(19) United States
(12) Patent Application Publication
(10) Pub. No.: US 2023/0029453 A1
(43) Pub. Date: Feb. 2, 2023

(54) Prostate Neoantigens And Their Uses

(71) Applicant: Janssen Biotech, Inc., Horsham, PA (US)

(72) Inventors: Jason Lee DeHart, San Diego, CA (US); Vipul Bhargava, Warrington, PA (US); Manuel Alejandro Sepulveda, West Windsor, NJ (US)

(21) Appl. No.: 17/366,946

(22) Filed: Jul. 2, 2021

Related U.S. Application Data
(60) Provisional application No. 63/048,509, filed on Jul. 6, 2020.

(51) Int. Cl. A61K 39/00; C07K 14/005; C07K 14/47; A61P 35/00; A61K 45/06; C12N 7/00; C12N 15/86; A61K 9/51

(52) U.S. Cl. CPC A61K 39/001193; C12N 2710/24071; C07K 14/4748; A61P 35/00; A61K 45/06; C12N 7/00; C12N 15/86; A61K 9/5123; A61K 2039/5256; A61K 2039/5254; A61K 2039/884; A61K 2039/53; C12N 2750/14143; C12N 2750/14134; C12N 2750/14171; C12N 2710/24043; C12N 2710/24034; C07K 14/005

(57) ABSTRACT

Disclosed herein are self-replicating RNA molecules encoding prostate neoantigens, vaccines, and methods of treating and preventing prostate cancer.

### CROSS REFERENCE TO RELATED APPLICATIONS

[0001] This application claims priority to U.S. Provisional Application No. 63/048,509, filed Jul. 6, 2020, the disclosure of which is hereby incorporated by reference in its entirety.

### SEQUENCE LISTING

[0002] This application contains a Sequence Listing submitted via EFS-Web, the entire content of which is incorporated herein by reference in its entirety. The ASCII text file, created on 1 Jul. 2021, is named 103693.002551_SL.txt and is 609 kilobytes in size.

### BACKGROUND

[0003] Prostate cancer is the most common non-cutaneous malignancy in men and the second leading cause of death in men from cancer in the western world. Prostate cancer results from the uncontrolled growth of abnormal cells in the prostate gland. Once a prostate cancer tumor develops, androgens such as testosterone promote prostate cancer growth. At its early stages, localized prostate cancer is often curable with local therapy including, for example, surgical removal of the prostate gland and radiotherapy. However, when local therapy fails to cure prostate cancer, as it does in up to a third of men, the disease progresses into incurable metastatic disease.

[0004] For many years, the established standard of care for men with malignant castration-resistant prostate cancer (mCRPC) was docetaxel chemotherapy. More recently, abiraterone acetate (ZYTIGA®) in combination with prednisone has been approved for treating metastatic castrate resistant prostate cancer. Androgen receptor (AR)-targeted agents, such as enzalutamide (XTANDI®) have also entered the market for treating metastatic castrate resistant prostate cancer. Platinum-based chemotherapy has been tested in a number of clinical studies in molecularly unselected prostate cancer patients with limited results and significant toxicities. However, there remains a subset of patients who either do not respond initially or become refractory (or resistant) to these treatments. No approved therapeutic options are available for such patients.

### BRIEF SUMMARY

[0005] Provided herein are self-replicating RNA molecules comprising an RNA encoding one or more polypeptides selected from the group consisting of SEQ ID NOs: 1, 3, 5, 7, 9, 11, 13, 15, 17, 19, 21, 23, 25, 27, 29, 31, 33, 35, 37, 39, 41, 43, 45, 47, 49, 51, 53, 55, 57, 59, 61, 63, 65, 67, 69, 71, 73, 75, 77, 79, 81, 83, 85, 87, 89, 91, 93, 95, 97, 99, 101, 103, 105, 107, 109, 111, 113, 115, 117, 119, 121, 123, 125, 127, 129, 131, 133, 135, 137, 139, 141, 143, 145, 147, 149, 151, 153, 155, 157, 159, 161, 163, 165, 167, 169, 171, 173, 175, 177, 179, 181, 183, 185, 187, 189, 191, 193, 195, 197, 199, 201, 203, 205, 207, 209, 211, 213, 215, 217, 219, 221, 223, 225, 227, 229, 231, 233, 235, 237, 239, 241, 243, 245, 247, 249, 251, 253, 255, 257, 259, 261, 263, 265, 267, 269, 271, 273, 275, 277, 279, 281, 283, 285, 287, 289, 291, 293, 295, 297, 299, 301, 303, 305, 307, 309, 311, 313, 315, 317, 319, 321, 323, 325, 327, 329, 331, 333, 335, 337, 339, 341, 343, 345, 347, 349, 351, 353, 355, 357, 359, 361, 363, 365, 367, 369, 371, 373, 375, 379, 381, 383, 385, 387, 388, 389, 390, 391, 392, 393, 394, 395, 396, 397, 398, 399, 400, 401, 402, 403, 404, 405, 406, 407, 408, 426, 427, 428, 429, 430, 431, 432, 433, 434, 435, 436, 437, 438, 439, 440, 441, 442, 443, 444, 445, 446, 447, 1001, 1003, and fragments thereof.

[0006] Also disclosed are self-replicating RNA molecules comprising an RNA corresponding to one or more polynucleotides selected from the group consisting of SEQ ID NOs: 2, 4, 6, 8, 10, 12, 14, 16, 18, 20, 22, 24, 26, 28, 30, 32, 34, 36, 38, 40, 42, 44, 46, 48, 50, 52, 54, 56, 58, 60, 62, 64, 66, 68, 70, 72, 74, 76, 78, 80, 82, 84, 86, 88, 90, 92, 94, 96, 98, 100, 102, 104, 106, 108, 110, 112, 114, 116, 118, 120, 122, 124, 126, 128, 130, 132, 134, 136, 138, 140, 142, 144, 146, 148, 150, 152, 154, 156, 158, 160, 162, 164, 166, 168, 170, 172, 174, 176, 178, 180, 182, 184, 186, 188, 190, 192, 194, 196, 198, 200, 202, 204, 206, 208, 210, 212, 214, 216, 218, 220, 222, 224, 226, 228, 230, 232, 234, 236, 238, 240, 242, 244, 246, 248, 250, 252, 254, 256, 258, 260, 262, 264, 266, 268, 270, 272, 274, 276, 278, 280, 282, 284, 286, 288, 290, 292, 294, 296, 298, 300, 302, 304, 306, 308, 310, 312, 314, 316, 318, 320, 322, 324, 326, 328, 330, 332, 334, 336, 338, 340, 342, 344, 346, 348, 350, 352, 354, 356, 358, 360, 362, 364, 366, 368, 370, 372, 374, 376, 380, 382, 384, 386, 448, 449, 450, 451, 452, 453, 454, 455, 456, 457, 458, 459, 460, 461, 462, 463, 464, 465, 466, 467, 468, 469, 470, 471, 472, 473, 474, 475, 476, 477, 478, 479, 480, 481, 482, 483, 484, 485, 486, 487, 488, 489, 490, 491, 492, 493, 494, 495, 496, 497, 498, 499, 500, 501, 503, 504, 505, 506, 507, 508, 509, 510, 511, 512, 513, 514, 515, 516, 517, 519, 520, 521, 522, 523, 524, 525, 528, 529, 530, 531, 532, 533, 534, 535, 536, 537, 538, 539, 540, 1000, 1002, and fragments thereof.

[0007] Also disclosed are self-replicating RNA molecules wherein the self-replicating RNA molecule comprises an RNA encoding one or more polypeptides selected from the group consisting of SEQ ID NOs: 275, 381, 333, 337, 269, 253, 309, 325, 271, 305, 251, 245, 261, 265, 317, 255, 277, 297, 285, 437, 439, 442, 444, 379, 343, 211, 349, 213, 215, 221, 219, 225, 345, 353, 235, 223, 167, 171, 19, 23, 177, 1001, 1003, and fragments thereof.

[0008] The disclosure also provides self-replicating RNA molecules comprising an RNA corresponding to one or more polynucleotides selected from the group consisting of SEQ ID NOs: 276, 382, 334, 338, 270, 254, 310, 326, 272, 306, 252, 246, 262, 266, 318, 256, 278, 298, 286, 448, 450, 453, 455, 380, 344, 212, 350, 214, 216, 222, 220, 226, 346, 354, 236, 224, 168, 172, 20, 24, 178, 1000, 1002, and fragments thereof.

[0009] Also disclosed are self-replicating RNA molecules comprising an RNA encoding a polypeptide of SEQ ID NOs: 541, 543, 550, 552, 554, 555, 556, 557, 558, 559, 623, or 624, 625, 626, 1004, or 1005.

[0010] Provided are self-replicating RNA molecules comprising one or more of the following:
[0011] a) one or more nonstructural genes nsP1, nsP2, nsP3, and nsP4;
[0012] b) at least one of a DLP motif, a 5′ UTR, a 3′UTR, and a Poly A;
[0013] c) a subgenomic promoter; and
[0014] d) an RNA encoding one or more polypeptides selected from the group consisting of SEQ ID NOs: 275, 381, 333, 337, 269, 253, 309, 325, 271, 305, 251, 245, 261, 265, 317, 255, 277, 297, 285, 437, 439, 442, 444, 379, 343, 211, 349, 213, 215, 221, 219, 225, 345, 353, 235, 223, 167, 171, 19, 23 177, 1001, 1003, and fragments thereof; operably linked to the subgenomic promoter.

[0015] Also disclosed are RNA molecules comprising one or more of the following:
[0016] a) one or more nonstructural genes nsP1, nsP2, nsP3, and nsP4;
[0017] b) at least one of a DLP motif, 5′ UTR, a 3′UTR, and a Poly A;
[0018] c) a subgenomic promoter; and
[0019] d) RNA encoding one or more polypeptides selected from the group consisting of SEQ ID NOs: 541, 543, 550, 552, 554, 555, 556, 557, 558, 559, 623, 624, 625, 626, 1004, 1005, and fragments thereof; operably linked to the subgenomic promoter.

[0020] The disclosure also provides self-replicating RNA molecules encapsulated in, bound to, or adsorbed on a liposome, a lipoplex, a lipid nanoparticle, or combinations thereof. In some embodiments, the self-replicating RNA molecule is encapsulated in a lipid nanoparticle.

[0021] Also provided are methods of immunizing and methods of treating or preventing prostate cancer in a subject, comprising administering to the subject in need thereof any of the disclosed self-replicating RNA molecules. In some embodiments, the methods comprise administering to the subject:

[0022] a first vaccine comprising a self-replicating RNA molecule comprising an RNA encoding one or more polypeptides selected from the group consisting of SEQ ID NOs: 275, 381, 333, 337, 269, 253, 309, 325, 271, 305, 251, 245, 261, 265, 317, 255, 277, 297, 285, 437, 439, 442, 444, 379, 343, 211, 349, 213, 215, 221, 219, 225, 345, 353, 235, 223, 167, 171, 19, 23, 177, 1001, and 1003; and

[0023] a second vaccine comprising a polynucleotide encoding one or more polypeptides selected from the group consisting of SEQ ID NOs: 275, 381, 333, 337, 269, 253, 309, 325, 271, 305, 251, 245, 261, 265, 317, 255, 277, 297, 285, 437, 439, 442, 444, 379, 343, 211, 349, 213, 215, 221, 219, 225, 345, 353, 235, 223, 167, 171, 19, 23, 177, 1001, and 1003; wherein the first polypeptide and the second polypeptide have distinct amino acid sequences.

### BRIEF DESCRIPTION OF THE DRAWINGS

[0024] The summary, as well as the following detailed description, is further understood when read in conjunction with the appended drawings. For the purpose of illustrating the disclosed compositions and methods, there are shown in the drawings exemplary embodiments of the compositions and methods; however, the compositions and methods are not limited to the specific embodiments disclosed. In the drawings:

[0025] FIG. 1 depicts an exemplary chimeric read-through fusion between Gene A and Gene B. Neoantigenic peptide sequences arise at the breakpoint junction.

[0026] FIG. 2 depicts an exemplary gene fusion resulting from chromosomal alteration, such as DNA translocations.

[0027] FIG. 3 depicts exemplary splice variants with alternative 5′ or 3′ splice sites, retained introns, excluded exons or alternative terminations or insertions.

[0028] FIG. 4 depicts an exemplary approach of identification of splice variants.

[0029] FIG. 5A shows an exemplary flow cytometry dot plot depicting TNFα⁺IFNγ⁺CD8⁺ T cell frequencies in PBMC samples after no stimulation (DMSO).

[0030] FIG. 5B shows an exemplary flow cytometry dot plot depicting TNFα⁺IFNγ⁺CD8⁺ T cell frequencies in PBMC samples after stimulating with CEF peptide.

[0031] FIG. 5C shows an exemplary flow cytometry dot plot depicting TNFα⁺IFNγ⁺CD8⁺ T cell frequencies in PBMC samples after stimulation with P16.

[0032] FIG. 5D shows an exemplary flow cytometry dot plot depicting TNFα⁺IFNγ⁺CD8⁺ T cell frequencies in PBMC samples after stimulation with P98.

[0033] FIG. 5E shows an exemplary flow cytometry dot plot depicting TNFα⁺IFNγ⁺CD8⁺ T cell frequencies in PBMC samples after stimulation with P3 self-antigen.

[0034] FIG. 6 shows the number of prostate cancer patients whose PBMC samples demonstrated a positive immune response to the specified neoantigens. P3, P6, P7, P9, and P92 represent self-antigens.

[0035] FIG. 7 shows the number of prostate cancer patients whose PBMC samples demonstrated a positive CD4⁺ immune response to the specified neoantigens.

[0036] FIG. 8 shows the number of prostate cancer patients whose PBMC samples demonstrated a positive CD8⁺ immune response to the specified neoantigens.

[0037] FIG. 9 panel A shows the schematic representation of the alphavirus genome of the Semliki Forest virus, a positive-sensed, single-stranded RNA that encodes the non-structural polyproteins (nsP1-nsP4; replicase) at the 5′-end and the structural genes (capsid and glycoproteins) at the 3′-end.

[0038] FIG. 9 panel B shows the schematic representation of an exemplary self-replicating RNA (srRNA) derived from alphavirus replicons, where viral structural genes are replaced by heterologous genes of interest under the transcriptional control of a subgenomic promoter (SGP). Conserved sequence elements (CSE) at the 5′ and 3′-end act as promoters for minus-strand and positive-strand RNA transcription. After the srRNA is delivered into a cell, the non-structural polyprotein precursor (nsP1234) is translated from in vitro transcribed srRNA. nsP1234 is at early stages auto-proteolytically processed to the fragments nsP123 and nsP4, which transcribes negative-stranded copies of the srRNA. Later, nsP123 is completely processed to single proteins, which assemble to the (+) strand replicase to transcribe new positive-stranded genomic copies, as well as (+) stranded subgenomic transcripts that code for the gene of interest. Subgenomic RNA as well as new genomic RNA is capped and poly-adenylated. Inactive promoters are dotted arrows; active promoters are lined arrows (Beissert et al., Hum Gene Ther. 2017, 28(12): 1138-1146).

[0039] FIG. 10 is a schematic illustration of an exemplary srRNA derived from an alphavirus that contains a 5′-cap, nonstructural genes (NSP1-4), 26S subgenomic promoter (grey arrow), the gene of interest (GOI), and a 3′-polyadenylated tail. The illustration also shows the 2A ribosome skipping element (2AP) and the duplicated first 193 nucleotides of nsP1 downstream of the 5′-UTR and upstream of the DLP except for the start codon.

[0040] FIG. 11 is a schematic illustration of an exemplary lipid nanoparticle (LNP) encapsulating srRNA, with the percent molar ratios of lipid components as indicated (Geall et al., PNAS, 2012, 109:14604-14609).

[0041] FIG. 12A, FIG. 12B, FIG. 12C, FIG. 12D, FIG. 12E, and FIG. 12F illustrate the binding of various 9-mer peptides generated from FUS1 (SEQ ID NO: 1001) and P22 (SEQ ID NO: 1003) to the indicated HLA alleles. Peptides 1-3 correspond to 9-mers derived from FUS1 and peptides 4-10 correspond to 9-mers derived from P22.

### DETAILED DESCRIPTION

[0042] The disclosed compositions and methods may be understood more readily by reference to the following detailed description taken in connection with the accompanying figures, which form a part of this disclosure. It is to be understood that the disclosed compositions and methods are not limited to the specific compositions and methods described and/or shown herein, and that the terminology used herein is for the purpose of describing particular embodiments by way of example only and is not intended to be limiting of the claimed compositions and methods.

[0043] All publications, including but not limited to patents and patent applications, cited in this specification are herein incorporated by reference as though fully set forth.

[0044] Although any methods and materials similar or equivalent to those described herein may be used in the practice for testing of the present disclosure, exemplary materials and methods are described. In describing and claiming the present disclosure, the following terminology will be used.

[0045] Unless specifically stated otherwise, any description as to a possible mechanism or mode of action or reason for improvement is meant to be illustrative only, and the disclosed compositions and methods are not to be constrained by the correctness or incorrectness of any such suggested mechanism or mode of action or reason for improvement.

[0046] Throughout this text, the descriptions refer to compositions and methods of using the compositions. Where the disclosure describes or claims a feature or embodiment associated with a composition, such a feature or embodiment is equally applicable to the methods of using the composition. Likewise, where the disclosure describes or claims a feature or embodiment associated with a method of using a composition, such a feature or embodiment is equally applicable to the composition.

[0047] It is to be appreciated that certain features of the disclosed compositions and methods which are, for clarity, described herein in the context of separate embodiments, may also be provided in combination in a single embodiment. Conversely, various features of the disclosed compositions and methods that are, for brevity, described in the context of a single embodiment, may also be provided separately or in any subcombination.

[0048] Various terms relating to aspects of the description are used throughout the specification and claims. Such terms are to be given their ordinary meaning in the art unless otherwise indicated. Other specifically defined terms are to be construed in a manner consistent with the definitions provided herein.

[0049] As used in this specification and the appended claims, the singular forms “a,” “an,” and “the” include plural referents unless the content clearly dictates otherwise. Thus, for example, reference to “a cell” includes a combination of two or more cells, and the like.

[0050] Embodiments described in terms of the phrase “comprising” (or its equivalents) also provide as embodiments those independently described in terms of “consisting of” and “consisting essentially of” Embodiments described in terms of the phrase “consisting essentially of” (or its equivalents) also provide as embodiments those independently described in terms of “consisting of.”

[0051] As used in this specification and the appended claims, the phrase “and fragments thereof” when appended to a list includes fragments of one or more members of the associated list. The list may comprise a Markush group so that, as an example, the phrase “the group consisting of peptides A, B, and C, and fragments thereof” specifies or recites a Markush group including A, B, C, fragments of A, fragments of B, and/or fragments of C.

[0052] “Isolated” refers to a homogenous population of molecules (such as synthetic polynucleotides or polypeptides) which have been substantially separated and/or purified away from other components of the system the molecules are produced in, such as a recombinant cell, as well as a protein that has been subjected to at least one purification or isolation step. “Isolated” refers to a molecule that is substantially free of other cellular material and/or chemicals and encompasses molecules that are isolated to a higher purity, such as to 80%, 81%, 82%, 83%, 84%, 85%, 86%, 87%, 88%, 89%, 90%, 91%, 92%, 93%, 94%, 95%, 96%, 97%, 98%, 99% or 100% purity.

[0053] “Immunogenic fragment” refers to a polypeptide that is recognized by cytotoxic T lymphocytes, helper T lymphocytes, or B cells when the fragment is in complex with MHC class I or MHC class II molecules.

[0054] “In-frame” refers to the reading frame of codons in a first polynucleotide being the same as the reading frame of codons in a second polynucleotide which are joined together to form a polynucleotide. In-frame polynucleotide encodes a polypeptide encoded by both the first polynucleotide and the second polynucleotide.

[0055] “Immunogenic” refers to a polypeptide that comprises one or more immunogenic fragments.

[0056] “Heterologous” refers to two or more polynucleotides or two or more polypeptides that are not found in the same relationship to each other in nature.

[0057] “Heterologous polynucleotide” refers to a non-naturally occurring polynucleotide that encodes two or more neoantigens as described herein.

[0058] “Heterologous polypeptide” refers to a non-naturally occurring polypeptide comprising two or more neoantigen polypeptides as described herein.

[0059] “Non-naturally occurring” refers to a molecule that does not exist in nature.

[0060] “Neoantigen” refers to a polypeptide that is present in prostate tumor tissue that has at least one alteration that makes it distinct from the corresponding wild-type polypeptide present in non-malignant tissue, e.g., via mutation in a tumor cell or post-translational modification specific to a tumor cell. A mutation can include a frameshift or nonframeshift insertion or deletion, missense or nonsense substitution, splice site alteration, aberrant splice variants, genomic rearrangement or gene fusion, or any genomic or expression alteration giving rise to the neoantigen.

[0061] “Recombinant” refers to polynucleotides, polypeptides, vectors, viruses, and other macromolecules that are prepared, expressed, created or isolated by recombinant means.

[0062] “Vaccine” refers to a composition that comprises one or more immunogenic polypeptides, immunogenic polynucleotides or fragments, or any combination thereof intentionally administered to induce acquired immunity in the recipient (e.g. subject).

[0063] “Treat,” “treating,” or “treatment” of a disease or disorder such as cancer refers to accomplishing one or more of the following: reducing the severity and/or duration of the disorder, inhibiting worsening of symptoms characteristic of the disorder being treated, limiting or preventing recurrence of the disorder in subjects that have previously had the disorder, or limiting or preventing recurrence of symptoms in subjects that were previously symptomatic for the disorder.

[0064] “Prevent,” “preventing,” “prevention,” or “prophylaxis” of a disease or disorder means preventing that a disorder occurs in subject.

[0065] “Therapeutically effective amount” refers to an amount effective, at doses and for periods of time necessary, to achieve a desired therapeutic result. A therapeutically effective amount may vary depending on factors such as the disease state, age, sex, and weight of the individual, and the ability of a therapeutic or a combination of therapeutics to elicit a desired response in the individual. Exemplary indicators of an effective therapeutic or combination of therapeutics that include, for example, improved well-being of the patient.

[0066] “Relapsed” refers to the return of a disease or the signs and symptoms of a disease after a period of improvement after prior treatment with a therapeutic.

[0067] “Refractory” refers to a disease that does not respond to a treatment. A refractory disease can be resistant to a treatment before or at the beginning of the treatment, or a refractory disease can become resistant during a treatment.

[0068] “Replicon” refers to a viral nucleic acid that is capable of directing the generation of copies of itself and includes RNA as well as DNA. For example, double-stranded DNA versions of arterivirus genomes can be used to generate a single-stranded RNA transcript that constitutes an arterivirus replicon. Generally, a viral replicon contains the complete genome of the virus.

[0069] The term “RNA replicon” (or “self-replicating RNA,” or “self-replicating RNA molecule”) refer to RNA which contains all of the genetic information required for directing its own amplification or self replication within a permissive cell. To direct its own replication, the RNA molecule 1) encodes polymerase, replicase, or other proteins which may interact with viral or host cell-derived proteins, nucleic acids or ribonucleoproteins to catalyze the RNA amplification process; and 2) contain cis-acting RNA sequences required for replication and transcription of the replicon-encoded RNA. Self-replicating RNA is typically derived from the genomes of positive strand RNA viruses and can be used as basis of introducing foreign sequences to host cells by replacing viral sequences encoding structural or non-structural genes or inserting the foreign sequences 5′ or 3′ of the sequences encoding the structural or non-structural genes. Foreign sequences may also be introduced into the subgenomic regions of alphaviruses. Self-replicating RNA may be packaged into recombinant virus particles, such as recombinant alphavirus particles or alternatively delivered to the host using lipid nanoparticles (LNP). Self-replicating RNA may be at least 1 kb or at least 2 kb or at least 3 kb or at least 4 kb or at least 5 kb or at least 6 kb or at least 7 kb or at least 8 kb or at least 10 kb or at least 12 kb or at least 15 kb or at least 17 kb or at least 19 kb or at least 20 kb in size, or can be 100 bp-8 kb or 500 bp-8 kb or 500 bp-7 kb or 1-7 kb or 1-8 kb or 2-15 kb or 2-20 kb or 5-15 kb or 5-20 kb or 7-15 kb or 7-18 kb or 7-20 kb in size. Self-replicating RNAs are described, for example, in Int'l Pub. Nos. WO2017/180770, WO2018/075235, WO2019143949A2.

[0070] “Subgenomic RNA” refers to an RNA molecule of a length or size which is smaller than the genomic RNA from which it was derived. The viral subgenomic RNA can be transcribed from an internal promoter, whose sequences reside within the genomic RNA or its complement. Transcription of a subgenomic RNA can be mediated by viral-encoded polymerase(s) associated with host cell-encoded proteins, ribonucleoprotein(s), or a combination thereof. Numerous RNA viruses generate subgenomic mRNAs (sgRNAs) for expression of their 3′-proximal genes.

[0071] “Sub-genomic replicon” refers to a viral nucleic acid that contains something less than the full complement of genes and other features of the viral genome, yet is still capable of directing the generation of copies of itself. For example, the sub-genomic replicons of arterivirus may contain most of the genes for the non-structural proteins of the virus, but are missing most of the genes coding for the structural proteins. Sub-genomic replicons are capable of directing the expression of all of the viral genes necessary for the replication of the viral sub-genome (replication of the sub-genomic replicon), without the production of viral particles.

[0072] The viral subgenomic RNA can be transcribed from an internal promoter, whose sequences reside within the genomic RNA or its complement. Transcription of a subgenomic RNA can be mediated by viral-encoded polymerase(s) associated with host cell-encoded proteins, ribonucleoprotein(s), or a combination thereof.

[0073] “RNA corresponding to” refers to an RNA transcript generated from the DNA encoding the RNA or the RNA complement of a cDNA.

[0074] As used herein, a “downstream loop” or “DLP motif” refers to a polynucleotide sequence comprising at least one RNA stem-loop, which when placed downstream of a start codon of an open reading frame (ORF), provides increased translation the ORF compared to an otherwise identical construct without the DLP motif.

[0075] “Subject” includes any human or nonhuman animal “Nonhuman animal” includes all vertebrates, e.g., mammals and non-mammals, such as nonhuman primates, sheep, dogs, cats, horses, cows, chickens, amphibians, reptiles, etc. The terms “subject” and “patient” can be used interchangeably herein.

[0076] “In combination with” means that two or more therapeutic agents are be administered to a subject together in a mixture, concurrently as single agents or sequentially as single agents in any order.

[0077] “Enhance” or “induce” when in reference to an immune response refers to increasing the scale and/or efficiency of an immune response or extending the duration of the immune response. The terms are used interchangeably with “augment.”

[0078] “Immune response” refers to any response to an immunogenic polypeptide or polynucleotide or fragment by the immune system of a vertebrate subject. Exemplary immune responses include local and systemic cellular as well as humoral immunity, such as cytotoxic T lymphocyte (CTL) responses, including antigen-specific induction of CD8⁺ CTLs, helper T-cell responses including T-cell proliferative responses and cytokine release, and B-cell responses including antibody response.

[0079] “Variant,” “mutant,” or “altered” refers to a polypeptide or a polynucleotide that differs from a reference polypeptide or a reference polynucleotide by one or more modifications, for example one or more substitutions, insertions or deletions.

[0080] “About” means within an acceptable error range for the particular value as determined by one of ordinary skill in the art, which will depend in part on how the value is measured or determined, i.e., the limitations of the measurement system. Unless explicitly stated otherwise within the Examples or elsewhere in the Specification in the context of a particular assay, result or embodiment, “about” means within one standard deviation per the practice in the art, or a range of up to 5%, whichever is larger.

[0081] “Prime-boost” or “prime-boost regimen” refers to a method of treating a subject involving priming a T-cell response with a first vaccine followed by boosting the immune response with a second vaccine. The first vaccine and the second vaccine are typically distinct. These prime-boost immunizations elicit immune responses of greater height and breadth than can be achieved by priming and boosting with the same vaccine. The priming step initiates memory cells and the boost step expands the memory response. Boosting can occur once or multiple times.

[0082] Cancer cells produce neoantigens that result from genomic alterations and aberrant transcriptional programs. Neoantigen burden in patients has been associated with response to immunotherapy (Snyder et al., N Engl J Med. 2014 Dec. 4; 371(23):2189-2199. doi: 10.1056/NEJMoa1406498. Epub 2014 Nov. 19; Le et al., N Engl J Med. 2015 Jun. 25; 372(26):2509-20. doi: 10.1056/NEJMoa1500596. Epub 2015 May 30; Rizvi et al., Science. 2015 Apr. 3; 348(6230):124-8. doi: 10.1126/science.aaa1348. Epub 2015 Mar. 12; Van Allen et al., Science. 2015 Oct. 9; 350(6257):207-211. doi: 10.1126/science.aad0095. Epub 2015 Sep. 10). The disclosure is based, at least in part, on the identification of prostate neoantigens that are common in prostate cancer patients and hence can be utilized to develop a therapy amenable to treatment of a spectrum of prostate cancer patients.

[0083] The disclosure provides self-replicating RNA molecules comprising RNA encoding prostate neoantigens, vectors, host cells, vaccines comprising the neoantigens or polynucleotides encoding the neoantigens, and methods of making and using them. The disclosure also provides vaccines comprising the prostate neoantigens of the disclosure that are prevalent in a population of prostate cancer patients, thereby providing a pan-vaccine that may be useful to treating a broad population of patients having prostate cancer of various stages, such as localized or metastasized prostate cancer.

### Self-Replicating RNA Molecules

[0084] Self-replicating RNA molecules contain all of the genetic information required for directing their own amplification or self replication within a permissive cell. To direct their own replication, self-replicating RNA molecules encode polymerase, replicase, or other proteins which may interact with viral or host cell-derived proteins, nucleic acids or ribonucleoproteins to catalyze the RNA amplification process; and contain cis-acting RNA sequences required for replication and transcription of the replicon-encoded RNA. Thus, RNA replication leads to the production of multiple daughter RNAs. These daughter RNAs, as well as collinear subgenomic transcripts, can be translated to provide in situ expression of a gene of interest, or can be transcribed to provide further transcripts with the same sense as the delivered RNA which are translated to provide in situ expression of the gene of interest. The overall results of this sequence of transcriptions is a huge amplification in the number of the introduced replicon RNAs and so the encoded gene of interest becomes a major polypeptide product of the cells.

[0085] There are two open reading frames (ORFs) in the genome of alphaviruses, non-structural (ns) and structural genes. The ns ORF encodes proteins (nsP1-nsP4) necessary for transcription and replication of viral RNA and are produced as a polyprotein and are the virus replication machinery. The structural ORF encodes three structural proteins: the core nucleocapsid protein C, and the envelope proteins P62 and E1 that associate as a heterodimer. The viral membrane-anchored surface glycoproteins are responsible for receptor recognition and entry into target cells through membrane fusion. The four ns protein genes are encoded by genes in the 5′ two-thirds of the genome, while the three structural proteins are translated from a subgenomic mRNA colinear with the 3′ one-third of the genome. An exemplary depiction of an alphavirus genome is shown in FIG. 9.

[0086] Self-replicating RNA can be used as basis of introducing foreign sequences to host cells by replacing viral sequences encoding structural genes or inserting the foreign sequences 5′ or 3′ of the sequences encoding the structural genes. They can be engineered to replace the viral structural genes downstream of the replicase, which are under control of a subgenomic promoter, by genes of interest (GOI), e.g. prostate neoantigens. Upon transfection, the replicase which is translated immediately, interacts with the 5′ and 3′ termini of the genomic RNA, and synthesizes complementary genomic RNA copies. Those act as templates for the synthesis of novel positive-stranded, capped, and poly-adenylated genomic copies, and subgenomic transcripts (FIG. 9). Amplification eventually leads to very high RNA copy numbers of up to 2×10⁵ copies per cell. The result is a uniform and/or enhanced expression of a GOI (e.g. prostate neoantigens) that can affect vaccine efficacy or therapeutic impact of a treatment. Vaccines based on self-replicating RNA can be dosed at very low levels due to the very high copies of RNA generated.

[0087] Since much lower amounts of replicon RNA compared to conventional viral vector suffice to achieve effective gene transfer and protective vaccination (Beissert et al., Hum Gene Ther. 2017, 28(12): 1138-1146), one of the significant values of the compositions and methods disclosed herein is that vaccine efficacy can be increased in individuals that are in a chronic or acute state of immune activation. Causes of chronic or acute immune activation could be found in individuals suffering from a subclinical or clinical infection or individuals undergoing medical treatments for cancer or other maladies (e.g., diabetes, malnutrition, high blood pressure, heart disease, Crohn's disease, muscular scleroses, etc.).

[0088] The self-replicating RNA molecules contain all of the genetic information required for directing its own amplification or self-replication within a permissive cell.

[0089] The self-replicating RNA molecules can be used as basis of introducing foreign sequences (e.g. prostate neoantigens) to host cells by replacing viral sequences encoding structural genes.

[0090] Provided herein are self-replicating RNA molecules comprising an isolated polynucleotide encoding one or more prostate neoantigens describe herein. The self-replicating RNA molecules can comprise an RNA encoding one or more polypeptides selected from the group consisting of SEQ ID NOs: 1, 3, 5, 7, 9, 11, 13, 15, 17, 19, 21, 23, 25, 27, 29, 31, 33, 35, 37, 39, 41, 43, 45, 47, 49, 51, 53, 55, 57, 59, 61, 63, 65, 67, 69, 71, 73, 75, 77, 79, 81, 83, 85, 87, 89, 91, 93, 95, 97, 99, 101, 103, 105, 107, 109, 111, 113, 115, 117, 119, 121, 123, 125, 127, 129, 131, 133, 135, 137, 139, 141, 143, 145, 147, 149, 151, 153, 155, 157, 159, 161, 163, 165, 167, 169, 171, 173, 175, 177, 179, 181, 183, 185, 187, 189, 191, 193, 195, 197, 199, 201, 203, 205, 207, 209, 211, 213, 215, 217, 219, 221, 223, 225, 227, 229, 231, 233, 235, 237, 239, 241, 243, 245, 247, 249, 251, 253, 255, 257, 259, 261, 263, 265, 267, 269, 271, 273, 275, 277, 279, 281, 283, 285, 287, 289, 291, 293, 295, 297, 299, 301, 303, 305, 307, 309, 311, 313, 315, 317, 319, 321, 323, 325, 327, 329, 331, 333, 335, 337, 339, 341, 343, 345, 347, 349, 351, 353, 355, 357, 359, 361, 363, 365, 367, 369, 371, 373, 375, 379, 381, 383, 385, 387, 388, 389, 390, 391, 392, 393, 394, 395, 396, 397, 398, 399, 400, 401, 402, 403, 404, 405, 406, 407, 408, 426, 427, 428, 429, 430, 431, 432, 433, 434, 435, 436, 437, 438, 439, 440, 441, 442, 443, 444, 445, 446, 447, 1001, 1003, and fragments thereof.

[0091] The self-replicating RNA molecules can comprise an RNA corresponding to one or more polynucleotides selected from the group consisting of SEQ ID NOs: 2, 4, 6, 8, 10, 12, 14, 16, 18, 20, 22, 24, 26, 28, 30, 32, 34, 36, 38, 40, 42, 44, 46, 48, 50, 52, 54, 56, 58, 60, 62, 64, 66, 68, 70, 72, 74, 76, 78, 80, 82, 84, 86, 88, 90, 92, 94, 96, 98, 100, 102, 104, 106, 108, 110, 112, 114, 116, 118, 120, 122, 124, 126, 128, 130, 132, 134, 136, 138, 140, 142, 144, 146, 148, 150, 152, 154, 156, 158, 160, 162, 164, 166, 168, 170, 172, 174, 176, 178, 180, 182, 184, 186, 188, 190, 192, 194, 196, 198, 200, 202, 204, 206, 208, 210, 212, 214, 216, 218, 220, 222, 224, 226, 228, 230, 232, 234, 236, 238, 240, 242, 244, 246, 248, 250, 252, 254, 256, 258, 260, 262, 264, 266, 268, 270, 272, 274, 276, 278, 280, 282, 284, 286, 288, 290, 292, 294, 296, 298, 300, 302, 304, 306, 308, 310, 312, 314, 316, 318, 320, 322, 324, 326, 328, 330, 332, 334, 336, 338, 340, 342, 344, 346, 348, 350, 352, 354, 356, 358, 360, 362, 364, 366, 368, 370, 372, 374, 376, 380, 382, 384, 386, 448, 449, 450, 451, 452, 453, 454, 455, 456, 457, 458, 459, 460, 461, 462, 463, 464, 465, 466, 467, 468, 469, 470, 471, 472, 473, 474, 475, 476, 477, 478, 479, 480, 481, 482, 483, 484, 485, 486, 487, 488, 489, 490, 491, 492, 493, 494, 495, 496, 497, 498, 499, 500, 501, 503, 504, 505, 506, 507, 508, 509, 510, 511, 512, 513, 514, 515, 516, 517, 519, 520, 521, 522, 523, 524, 525, 528, 529, 530, 531, 532, 533, 534, 535, 536, 537, 538, 539, 540, 1000, 1002, and fragments thereof.

[0092] The self-replicating RNA molecules can comprise an RNA encoding one or more polypeptides selected from the group consisting of SEQ ID NOs: 275, 381, 333, 337, 269, 253, 309, 325, 271, 305, 251, 245, 261, 265, 317, 255, 277, 297, 285, 437, 439, 442, 444, 379, 343, 211, 349, 213, 215, 221, 219, 225, 345, 353, 235, 223, 167, 171, 19, 23, 177, 1001, 1003, and fragments thereof.

[0093] The self-replicating RNA molecules can comprise an RNA encoding one or more polypeptides selected from the group consisting of:
[0094] AS18 comprising the amino acid sequence

(SEQ ID NO: 275)
WKFEMSYTVGGPPPHVHARPRHWKTDR;

[0095] P87 comprising the amino acid sequence YEAGMTLGGKILFFLFLLLPLSPFSLIF (SEQ ID NO: 381);
[0096] AS55 comprising the amino acid sequence

(SEQ ID NO: 333)
DGHSYTSKVNCLLLQDGFHGCVSITGAAGRRNLSIFLFLMLCKLEFHAC;

[0097] AS57 comprising the amino acid sequence

(SEQ ID NO: 337)
TGGKSTCSAPGPQSLPSTPFSTYPQWVILITEL;

[0098] AS15 comprising the amino acid sequence VLRFLDLKVRYLHS (SEQ ID NO: 269);
[0099] AS7 comprising the amino acid sequence DYWAQKEKGSSSFLRPSC (SEQ ID NO: 253);
[0100] AS43 comprising the amino acid sequence

(SEQ ID NO: 309)
VPFRELKNVSVLEGLRQGRLGGPCSCHCPRPSQARLTPVDVAGPFLCLGD
PGLFPPVKSSI;

[0101] AS51 comprising the amino acid sequence

(SEQ ID NO: 325)
GMECTLGQVGAPSPRREEDGWRGGHSRFKADVPAPQGPCWGGQPGSAPSS
APPEQSLLD;

[0102] AS16 comprising the amino acid sequence

(SEQ ID NO: 271)
GNTTLQQLGEASQAPSGSLIPLRLPLLWEVRG;

[0103] AS41 comprising the amino acid sequence

(SEQ ID NO: 305)
EAFQRAAGEGGPGRGGARRGARVLQSPFCRAGAGEWLGHQSLR;

[0104] AS6 comprising the amino acid sequence DYWAQKEKISIPRTHLC (SEQ ID NO: 251);
[0105] AS3 comprising the amino acid sequence VAMMVPDRQVHYDFGL (SEQ ID NO: 245);
[0106] AS11 comprising the amino acid sequence

(SEQ ID NO: 261)
VPFRELKNQRTAQGAPGIHHAASPVAANLCDPARHAQHTRIPCGAGQVRA
GRGPEAGGGVLQPQRPAPEKPGCPCRRGQPRLHTVKMWRA;

[0107] AS13 comprising the amino acid sequence KRSFAVTERII (SEQ ID NO: 265);
[0108] AS47 comprising the amino acid sequence

(SEQ ID NO: 317)
FKKFDGPCGERGGGRTARALWARGDSVLTPALDPQTPVRAPSLTRAAAA
V;

[0109] AS8 comprising the amino acid sequence LVLGVLSGHSGSRL (SEQ ID NO: 255);
[0110] AS19 comprising the amino acid sequence QWQHYHRSGEAAGTPLWRPTRN (SEQ ID NO: 277);
[0111] AS37 comprising the amino acid sequence

(SEQ ID NO: 297)
CHLFLQPQVGTPPPHTASARAPSGPPHPHESCPAGRRPARAAQTCARRQH
GLPGCEEAGTARVPSLHLHLHQAALGAGRGRGWGEACAQVPPSRG;

[0112] AS23 comprising the amino acid sequence KIQNKNCPD (SEQ ID NO: 285);
[0113] MS1 comprising the amino acid sequence

(SEQ ID NO: 437)
HYKLIQQPISLFSITDRLHKTFSQLPSVHLCSITFQWGHPPIFCSTNDIC
VTANFCISVTFLKPCFLLHEASASQ;

[0114] MS3 comprising the amino acid sequence

(SEQ ID NO: 439)
RTALTHNQDFSIYRLCCKRGSLCHASQARSPAFPKPVRPLPAPITRITPQ
LGGQSDSSQPLLTTGRPQGWQDQALRHTQQASPASCATITIPIHSAALGD
HSGDPGPAWDTCPPLPLTTLIPRAPPPYGDSTARSWPSRCGPLG;

[0115] MS6 comprising the amino acid sequence

(SEQ ID NO: 442)
YAYKDFLWCFPFSLVFLQEIQICCHVSCLCCICCSTRICLGCLLELFLSR
ALRALHVLWNGFQLHCQ;

[0116] MS8 comprising the amino acid sequence TMPAILKLQKNCLLSL (SEQ ID NO: 444); and
[0117] P82 comprising the amino acid sequence YEAGMTLGEKFRVGNCKHLKMTRP (SEQ ID NO: 379), and
[0118] fragments thereof.

[0119] In some embodiments, the self-replicating RNA molecules can comprise an RNA encoding one or more polypeptides selected from the group consisting of:
[0120] P16 comprising the amino acid sequence GVPGDSTRRAVRRMNTF (SEQ ID NO: 343);
[0121] FUS1 comprising the amino acid sequence CGASACDVSLIAMDSA (SEQ ID NO: 211);
[0122] FUS1 comprising the amino acid sequence GASACDVSLIAMDSAITLW (SEQ ID NO: 1001);
[0123] P22 comprising the amino acid sequence SLYHREKQLIAMDSAI (SEQ ID NO: 349);
[0124] P22 comprising the amino acid sequence SLYHREKQLIAMDSAITLW (SEQ ID NO: 1003);
[0125] FUS2 comprising the amino acid sequence TEYNQKLQVNQFSESK (SEQ ID NO: 213);
[0126] FUS3 comprising the amino acid sequence TEISCCTLSSEENEYLPRPEWQLQ (SEQ ID NO: 215);
[0127] FUS6 comprising the amino acid sequence CEERGAAGSLISCE (SEQ ID NO: 221);
[0128] FUSS comprising the amino acid sequence NSKMALNSEALSVVSE (SEQ ID NO: 219);
[0129] FUS8 comprising the amino acid sequence

(SEQ ID NO: 225)
WGMELAASRRFSWDHHSAGGPPRVPSVRSGAAQVQPKDPLPLRTLAGCLA
RTAHLRPGAESLPQPQLHCT;

[0130] FUS15 comprising the amino acid sequence HVVGYGHLDTSGSSSSSSWP (SEQ ID NO: 345);
[0131] P35 comprising the amino acid sequence

(SEQ ID NO: 353)
NSKMALNSLNSIDDAQLTRIAPPRSHCCFWEVNAP;

[0132] FUS19 comprising the amino acid sequence KMHFSLKEHPPPPCPP (SEQ ID NO: 235); and
[0133] FUS7 comprising the amino acid sequence

(SEQ ID NO: 223)
LWFQSSELSPTGAPWPSRRPTWRGTTVSPRTATSSARTCCGTKWPSSQEA
ALGLGSGLLRFSCGTAAIR,

[0134] and fragments thereof.

[0135] The self-replicating RNA molecules can comprise an RNA encoding one or more polypeptides selected from the group consisting of:
[0136] P16 comprising the amino acid sequence GVPGDSTRRAVRRMNTF (SEQ ID NO: 343);
[0137] FUS1 comprising the amino acid sequence CGASACDVSLIAMDSA (SEQ ID NO: 211);
[0138] FUS1 comprising the amino acid sequence GASACDVSLIAMDSAITLW (SEQ ID NO: 1001);
[0139] P22 comprising the amino acid sequence SLYHREKQLIAMDSAI (SEQ ID NO: 349);
[0140] P22 comprising the amino acid sequence SLYHREKQLIAMDSAITLW (SEQ ID NO: 1003);
[0141] FUS2 comprising the amino acid sequence TEYNQKLQVNQFSESK (SEQ ID NO: 213);
[0142] FUS3 comprising the amino acid sequence TEISCCTLSSEENEYLPRPEWQLQ (SEQ ID NO: 215);
[0143] FUS6 comprising the amino acid sequence CEERGAAGSLISCE (SEQ ID NO: 221);
[0144] FUSS comprising the amino acid sequence NSKMALNSEALSVVSE (SEQ ID NO: 219);
[0145] FUS8 comprising the amino acid sequence

(SEQ ID NO: 225)
WGMELAASRRFSWDHHSAGGPPRVPSVRSGAAQVQPKDPLPLRTLAGCLA
RTAHLRPGAESLPQPQLHCT;

[0146] FUS15 comprising the amino acid sequence HVVGYGHLDTSGSSSSSSWP (SEQ ID NO: 345);
[0147] P35 comprising the amino acid sequence

(SEQ ID NO: 353)
NSKMALNSLNSIDDAQLTRIAPPRSHCCFWEVNAP;

[0148] FUS19 comprising the amino acid sequence KMHFSLKEHPPPPCPP (SEQ ID NO: 235); and
[0149] FUS7 comprising the amino acid sequence

(SEQ ID NO: 223)
LWFQSSELSPTGAPWPSRRPTWRGTTVSPRTATSSARTCCGTKWPSSQEA
ALGLGSGLLRFSCGTAAIR,

[0150] and fragments thereof.

[0151] In some embodiments, the self-replicating RNA molecules can comprise an RNA encoding one or more polypeptides selected from the group consisting of:
[0152] AS18 comprising the amino acid sequence

(SEQ ID NO: 275)
WKFEMSYTVGGPPPHVHARPRHWKTDR;

[0153] P87 comprising the amino acid sequence YEAGMTLGGKILFFLFLLLPLSPFSLIF (SEQ ID NO: 381);
[0154] AS55 comprising the amino acid sequence

(SEQ ID NO: 333)
DGHSYTSKVNCLLLQDGFHGCVSITGAAGRRNLSIFLFLMLCKLEFHAC;

[0155] AS57 comprising the amino acid sequence

(SEQ ID NO: 337)
TGGKSTCSAPGPQSLPSTPFSTYPQWVILITEL;

[0156] AS15 comprising the amino acid sequence VLRFLDLKVRYLHS (SEQ ID NO: 269);
[0157] AS7 comprising the amino acid sequence DYWAQKEKGSSSFLRPSC (SEQ ID NO: 253);
[0158] AS43 comprising the amino acid sequence

(SEQ ID NO: 309)
VPFRELKNVSVLEGLRQGRLGGPCSCHCPRPSQARLTPVDVAGPFLCLGD
PGLFPPVKSSI;

[0159] AS51 comprising the amino acid sequence

(SEQ ID NO: 325)
GMECTLGQVGAPSPRREEDGWRGGHSRFKADVPAPQGPCWGGQPGSAPSS
APPEQSLLD;

[0160] AS16 comprising the amino acid sequence

(SEQ ID NO: 271)
GNTTLQQLGEASQAPSGSLIPLRLPLLWEVRG;

[0161] AS41 comprising the amino acid sequence

(SEQ ID NO: 305)
EAFQRAAGEGGPGRGGARRGARVLQSPFCRAGAGEWLGHQSLR;

[0162] AS6 comprising the amino acid sequence DYWAQKEKISIPRTHLC (SEQ ID NO: 251);
[0163] AS3 comprising the amino acid sequence VAMMVPDRQVHYDFGL (SEQ ID NO: 245);
[0164] AS11 comprising the amino acid sequence

(SEQ ID NO: 261)
VPFRELKNQRTAQGAPGIHHAASPVAANLCDPARHAQHTRIPCGAGQVRA
GRGPEAGGGVLQPQRPAPEKPGCPCRRGQPRLHTVKMWRA;

[0165] AS13 comprising the amino acid sequence KRSFAVTERII (SEQ ID NO: 265);
[0166] AS47 comprising the amino acid sequence

(SEQ ID NO: 317)
FKKFDGPCGERGGGRTARALWARGDSVLTPALDPQTPVRAPSLTRAAAA
V;

[0167] AS8 comprising the amino acid sequence LVLGVLSGHSGSRL (SEQ ID NO: 255);
[0168] AS19 comprising the amino acid sequence QWQHYHRSGEAAGTPLWRPTRN (SEQ ID NO: 277);
[0169] AS37 comprising the amino acid sequence

(SEQ ID NO: 297)
CHLFLQPQVGTPPPHTASARAPSGPPHPHESCPAGRRPARAAQTCARRQH
GLPGCEEAGTARVPSLHLHLHQAALGAGRGRGWGEACAQVPPSRG;

[0170] AS23 comprising the amino acid sequence KIQNKNCPD (SEQ ID NO: 285);
[0171] MS1 comprising the amino acid sequence

(SEQ ID NO: 437)
HYKLIQQPISLFSITDRLHKTFSQLPSVHLCSITFQWGHPPIFCSTNDIC
VTANFCISVTFLKPCFLLHEASASQ;

[0172] MS3 comprising the amino acid sequence

(SEQ ID NO: 439)
RTALTHNQDFSIYRLCCKRGSLCHASQARSPAFPKPVRPLPAPITRITPQ
LGGQSDSSQPLLTTGRPQGWQDQALRHTQQASPASCATITIPIHSAALGD
HSGDPGPAWDTCPPLPLTTLIPRAPPPYGDSTARSWPSRCGPLG;

[0173] MS6 comprising the amino acid sequence

(SEQ ID NO: 442)
YAYKDFLWCFPFSLVFLQEIQICCHVSCLCCICCSTRICLGCLLELFLSR
ALRALHVLWNGFQLHCQ;

[0174] MS8 comprising the amino acid sequence TMPAILKLQKNCLLSL (SEQ ID NO: 444); and
[0175] P82 comprising the amino acid sequence YEAGMTLGEKFRVGNCKHLKMTRP (SEQ ID NO: 379),
[0176] and fragments thereof.

[0177] In some embodiments, the polypeptide comprises one or more polypeptides selected from the group consisting of:
[0178] M84 comprising the amino acid sequence IARELHQFAFDLLIKSH (SEQ ID NO: 167);
[0179] M86 comprising the amino acid sequence QPDSFAALHSSLNELGE (SEQ ID NO: 171);
[0180] M10 comprising the amino acid sequence FVQGKDWGLKKFIRRDF (SEQ ID NO: 19);
[0181] M12 comprising the amino acid sequence FVQGKDWGVKKFIRRDF (SEQ ID NO: 23); and
[0182] FR1 comprising the amino acid sequence

(SEQ ID NO: 177)
QNLQNGGGSRSSATLPGRRRRRWLRRRRQPISVAPAGPPRRPNQKPNPPG
GARCVIMRPTWPGTSAFT,

[0183] and fragments thereof.

[0184] The self-replicating RNA molecules can comprise an RNA corresponding to one or more polynucleotides selected from the group consisting of SEQ ID NOs: 276, 382, 334, 338, 270, 254, 310, 326, 272, 306, 252, 246, 262, 266, 318, 256, 278, 298, 286, 448, 450, 453, 455, 380, 344, 212, 350, 214, 216, 222, 220, 226, 346, 354, 236, 224, 168, 172, 20, 24, 178, 1000, 1002, and fragments thereof. The self-replicating RNA molecules can comprise an RNA corresponding to one or more polynucleotides selected from the group consisting of:
[0185] the polynucleotide sequence of

(SEQ ID NO: 276)
TGGAAATTCGAGATGAGCTACACGGTGGGTGGCCCGCCTCCCCATGTTCA
TGCTAGACCCAGGCATTGGAAAACTGATAGA (encoding AS18);

[0186] the polynucleotide sequence of

(SEQ ID NO: 382)
TATGAAGCAGGGATGACTCTGGGAGGTAAGATACTTTTCTTTCTCTTCCT
CCTCCTTCCTCTCTCCCCCTTCTCCCTCATTTTC (encoding P87);

[0187] the polynucleotide sequence of

(SEQ ID NO: 334)
GATGGCCACTCCTACACATCCAAGGTGAATTGTTTACTCCTTCAAGATGG
GTTCCATGGCTGTGTGAGCATCACCGGGGCAGCTGGAAGAAGAAACCTGA
GCATCTTCCTGTTCTTGATGCTGTGCAAATTGGAGTTCCATGCTTGT
(encoding AS55);

[0188] the polynucleotide sequence of

(SEQ ID NO: 338)
ACAGGGGGCAAAAGCACCTGCTCGGCTCCTGGCCCTCAGTCTCTCCCCTC
CACTCCATTCTCCACCTACCCACAGTGGGTCATTCTGATCACCGAACTG
(encoding AS57);

[0189] the polynucleotide sequence of

(SEQ ID NO: 270)
GTGCTGCGCTTTCTGGACTTAAAGGTGAGATACCTGCACTCT
(encoding AS15);

[0190] the polynucleotide sequence of

(SEQ ID NO: 254)
GACTACTGGGCTCAAAAGGAGAAGGGATCATCTTCATTCCTGCGACCATC
CTGT (encoding AS7);

[0191] the polynucleotide sequence of

(SEQ ID NO: 310)
GTGCCCTTCCGGGAGCTCAAGAACGTGAGTGTCCTGGAGGGGCTCCGTCA
AGGCCGGCTTGGGGGTCCCTGTTCATGTCACTGCCCAAGACCTTCCCAGG
CCAGGCTCACGCCAGTGGATGTGGCAGGTCCCTTCTTGTGTCTGGGGGAT
CCTGGGCTGTTCCCCCCAGTCAAGAGCAGTATC (encoding AS43);

[0192] the polynucleotide sequence of

(SEQ ID NO: 326)
GGCATGGAGTGCACCCTGGGGCAGGTGGGTGCCCCGTCCCCTCGGAGGGA
GGAGGACGGTTGGCGTGGGGGCCACAGCCGATTCAAGGCTGATGTACCAG
CACCGCAGGGACCCTGCTGGGGTGGCCAACCTGGCTCTGCCCCCTCCTCA
GCTCCTCCTGAACAGTCATTATTAGAT (encoding AS51);

[0193] the polynucleotide sequence of

((SEQ ID NO: 272)
GGCAACACCACCCTCCAGCAGCTGGGTGAGGCCTCCCAGGCGCCCTCAGG
CTCCCTCATCCCTCTGAGGCTGCCTCTGCTCTGGGAAGTGAGGGGC
(encoding AS16);

[0194] the polynucleotide sequence of

(SEQ ID NO: 306)
GAGGCCTTCCAGAGGGCCGCTGGTGAGGGCGGCCCGGGCCGCGGTGGGGC
ACGGCGCGGTGCCAGGGTGTTGCAGAGCCCCTTTTGCAGGGCAGGAGCTG
GGGAGTGGTTAGGACATCAGTCCCTCAGG (encoding AS41);

[0195] the polynucleotide sequence of

(SEQ ID NO: 252)
GACTACTGGGCTCAAAAGGAGAAGATCAGCATCCCCAGAACACACCTGTG
T (encoding AS6);

[0196] the polynucleotide sequence of

(SEQ ID NO: 246)
GTTGCTATGATGGTTCCTGATAGACAGGTTCATTATGACTTTGGATTG
(encoding AS3);

[0197] the polynucleotide sequence of

(SEQ ID NO: 262)
GTGCCCTTCCGGGAGCTCAAGAACCAGAGAACAGCACAAGGGGCTCCTGG
GATCCACCACGCGGCTTCCCCCGTTGCTGCCAACCTCTGCGACCCGGCGA
GACACGCACAGCACACACGCATCCCCTGCGGCGCTGGCCAAGTGCGTGCT
GGCCGAGGTCCCGAAGCAGGTGGTGGAGTACTACAGCCACAGAGGCCTGC
CCCCGAGAAGCCTGGGTGTCCCTGCCGGAGAGGCCAGCCCAGGCTGCACA
CCGTGAAGATGTGGAGGGCG (encoding AS11);

[0198] the polynucleotide sequence of AAGAGAAGTTTTGCTGTCACGGAGAGGATCATC (SEQ ID NO: 266) (encoding AS13);
[0199] the polynucleotide sequence of

(SEQ ID NO: 318)
TTCAAGAAGTTCGACGGCCCTTGTGGTGAGCGCGGCGGCGGGCGCACGGC
TCGAGCTCTGTGGGCGCGCGGCGACAGCGTCCTGACTCCTGCCCTCGACC
CCCAGACCCCTGTCAGGGCGCCCTCCCTGACCCGAGCCGCAGCTGCCGTG
(encoding AS47);

[0200] the polynucleotide sequence of

(SEQ ID NO: 256)
CTTGTACTTGGTGTATTGAGCGGGCACAGTGGCTCACGCCTA
(encoding AS8);

[0201] the polynucleotide sequence of

(SEQ ID NO: 278)
CAGTGGCAGCACTACCACCGGTCAGGTGAGGCCGCAGGGACTCCCCTCTG
GAGACCCACAAGAAAC (encoding AS19);

[0202] the polynucleotide sequence of

(SEQ ID NO: 298)
TGCCACCTCTTCCTGCAGCCCCAGGTTGGCACCCCCCCCCCCCACACTGC
CAGTGCTCGAGCCCCCAGTGGTCCACCCCACCCTCATGAAAGTTGCCCTG
CAGGGCGAAGACCTGCGAGAGCTGCGCAGACATGTGCACGCCGACAGCAC
GGACTTCCTGGCTGTGAAGAGGCTGGTACAGCGCGTGTTCCCAGCCTGCA
CCTGCACCTGCACCAGGCCGCCCTCGGAGCAGGAAGGGGCCGTGGGTGGG
GAGAGGCCTGTGCCCAAGTACCCCCCTCAAGAGGC (encoding
AS37);

[0203] the polynucleotide sequence of AAAATTCAGAATAAAAATTGTCCAGAC (SEQ ID NO: 286) (encoding AS23);
[0204] the polynucleotide sequence of

(SEQ ID NO: 448)
CACTACAAATTAATTCAACAACCCATATCCCTCTTCTCCATCACTGATAG
GCTCCATAAGACGTTCAGTCAGCTGCCCTCGGTCCATCTCTGCTCAATCA
CCTTCCAGTGGGGACACCCGCCCATTTTCTGCTCAACAAATGATATCTGT
GTCACGGCCAACTTCTGCATCTCGGTCACATTCCTTAAACCGTGCTTCCT
CCTACATGAGGCATCTGCCTCACAG (encoding MS1);

[0205] the polynucleotide sequence of

(SEQ ID NO: 450)
AGGACCGCCCTGACACACAATCAGGACTTCTCTATCTACAGGCTCTGTTG
CAAGAGGGGGTCCCTCTGCCACGCTTCCCAGGCCAGATCCCCGGCTTTCC
CGAAGCCGGTCAGACCTCTTCCTGCCCCCATCACCAGAATCACCCCCCAA
CTGGGGGGACAATCTGACTCGAGTCAACCCCTTCTCACTACGGGAAGACC
TCAGGGGTGGCAAGATCAAGCTCTTAGACACACCCAGCAAGCCAGTCCTG
CCTCTTGTGCCACCATCACCATTCCCATCCACTCAGCTGCCCTTGGTGAC
CACTCCGGAGACCCTGGTCCAGCCTGGGACACCTGCCCGCCGCTGCCGCT
CACTACCCTCATCCCCCGAGCTCCCCCGCCGTATGGAGACAGCACTGCCA
GGTCCTGGCCCTCCCGCTGTGGGCCCCTCGGC (encoding MS3);

[0206] the polynucleotide sequence of

(SEQ ID NO: 453)
TATGCTTACAAGGACTTTCTCTGGTGTTTTCCTTTTTCTTTAGTTTTTCT
CCAAGAGATTCAAATCTGCTGCCATGTTAGCTGTCTTTGCTGTATCTGCT
GTAGTACACGAATATGCCTTGGCTGTTTGCTTGAGCTTTTTCTATCCCGT
GCTCTTCGTGCTCTTCATGTTCTTTGGAATGGCTTTCAACTTCATTGTCA
A (encoding MS6);

[0207] the polynucleotide sequence of ACCATGCCTGCTATTTTAAAGTTACAGAAGAATTGTCTTCTCTCCTTA (SEQ ID NO: 455) (encoding MS8); and
[0208] the polynucleotide sequence of

(SEQ ID NO: 380)
TATGAAGCAGGGATGACTCTGGGAGAAAAATTCCGGGTTGGCAATTGCAA
GCATCTCAAAATGACCAGACCC (encoding P82);

[0209] and fragments thereof.

[0210] In some embodiments, the RNA corresponding to one or more polynucleotides is selected from the group consisting of:
[0211] the polynucleotide sequence of

(SEQ ID NO: 344)
GGAGTTCCAGGAGATTCAACCAGGAGAGCAGTGAGGAGAATGAATACCTT
C (encoding P16);

[0212] the polynucleotide sequence of

(SEQ ID NO: 212)
TGCGGGGCCTCTGCCTGTGATGTCTCCCTCATTGCTATGGACAGTGCT
(encoding FUS1);

[0213] the polynucleotide sequence of

(SEQ ID NO: 1000)
GGGGCCTCTGCCTGTGATGTCTCCCTCATTGCTATGGACAGTGCTATCAC
CCTGTGG (encoding FUS1);

[0214] the polynucleotide sequence of

(SEQ ID NO: 350)
TCCCTCTACCACCGGGAGAAGCAGCTCATTGCTATGGACAGTGCTATC
(encoding P22);

[0215] the polynucleotide sequence of

(SEQ ID NO: 1002)
TCCCTCTACCACCGGGAGAAGCAGCTCATTGCTATGGACAGTGCTATCAC
CCTGTGG (encoding P22);

[0216] the polynucleotide sequence of

(SEQ ID NO: 214)
ACCGAATACAACCAGAAATTACAAGTGAATCAATTTAGTGAATCCAAA
(encoding FUS2);

[0217] the polynucleotide sequence of

(SEQ ID NO: 216)
ACAGAAATTTCATGTTGCACCCTGAGCAGTGAGGAGAATGAATACCTTCC
AAGACCAGAGTGGCAGCTCCAG (encoding FUS3);

[0218] the polynucleotide sequence of

(SEQ ID NO: 222)
TGTGAGGAGCGCGGCGCGGCAGGAAGCCTTATCAGTTGTGAG
(encoding FUS6);

[0219] the polynucleotide sequence of

(SEQ ID NO: 220)
AACAGCAAGATGGCTTTGAACTCAGAAGCCTTATCAGTTGTGAGTGAG
(encoding FUS5);

[0220] the polynucleotide sequence of

(SEQ ID NO: 226)
TGGGGGATGGAGTTGGCAGCGTCTCGGAGGTTCTCCTGGGACCACCACTC
CGCCGGGGGGCCGCCCAGAGTGCCAAGCGTCCGATCCGGCGCCGCCCAAG
TGCAGCCCAAGGACCCGCTCCCGCTCCGCACCCTGGCAGGCTGCCTAGCC
AGGACTGCGCACCTGCGCCCTGGGGCGGAGTCCTTACCCCAACCCCAGCT
TCACTGCACA (encoding FUS8);

[0221] the polynucleotide sequence of

(SEQ ID NO: 346)
CACGTGGTGGGCTATGGCCACCTTGATACTTCCGGGTCATCCTCCTCCTC
CTCCTGGCCC (encoding FUS15);

[0222] the polynucleotide sequence of

(SEQ ID NO: 354)
AACAGCAAGATGGCTTTGAACTCATTAAACTCCATTGATGATGCACAGTT
GACAAGAATTGCCCCTCCAAGATCTCATTGCTGTTTCTGGGAAGTAAACG
CTCCT (encoding P35);

[0223] the polynucleotide sequence of AAAATGCACTTCTCCCTCAAGGAGCACCCACCGCCCCCTTGCCCGCCT (SEQ ID NO: 236) (encoding FUS19); and
[0224] the polynucleotide sequence of

(SEQ ID NO: 224)
CTGTGGTTCCAGAGCAGTGAGCTGTCCCCGACGGGAGCGCCATGGCCCAG
CCGCCGCCCGACGTGGAGGGGGACGACTGTCTCCCCGCGTACCGCCACCT
CTTCTGCCCGGACCTGCTGCGGGACAAAGTGGCCTTCATCACAGGAGGCG
GCTCTGGGATTGGGTTCCGGATTGCTGAGATTTTCATGCGGCACGGCTGC
CATACGG (encoding FUS7),

[0225] and fragments thereof.

[0226] The RNA can correspond to two or more polynucleotides selected from the group consisting of:
[0227] the polynucleotide sequence of

(SEQ ID NO: 344)
GGAGTTCCAGGAGATTCAACCAGGAGAGCAGTGAGGAGAATGAATACCTT
C (encoding P16);

[0228] the polynucleotide sequence of

(SEQ ID NO: 212)
TGCGGGGCCTCTGCCTGTGATGTCTCCCTCATTGCTATGGACAGTGCT
(encoding FUS1);

[0229] the polynucleotide sequence of

(SEQ ID NO: 1000)
GGGGCCTCTGCCTGTGATGTCTCCCTCATTGCTATGGACAGTGCTATCAC
CCTGTGG (encoding FUS1);

[0230] the polynucleotide sequence of

(SEQ ID NO: 350)
TCCCTCTACCACCGGGAGAAGCAGCTCATTGCTATGGACAGTGCTATC
(encoding P22);

[0231] the polynucleotide sequence of

(SEQ ID NO: 1002)
TCCCTCTACCACCGGGAGAAGCAGCTCATTGCTATGGACAGTGCTATCAC
CCTGTGG (encoding P22);

[0232] the polynucleotide sequence of

(SEQ ID NO: 214)
ACCGAATACAACCAGAAATTACAAGTGAATCAATTTAGTGAATCCAAA
(encoding FUS2);

[0233] the polynucleotide sequence of

(SEQ ID NO: 216)
ACAGAAATTTCATGTTGCACCCTGAGCAGTGAGGAGAATGAATACCTTCC
AAGACCAGAGTGGCAGCTCCAG (encoding FUS3);

[0234] the polynucleotide sequence of

(SEQ ID NO: 222)
TGTGAGGAGCGCGGCGCGGCAGGAAGCCTTATCAGTTGTGAG
(encoding FUS6);

[0235] the polynucleotide sequence of

(SEQ ID NO: 220)
AACAGCAAGATGGCTTTGAACTCAGAAGCCTTATCAGTTGTGAGTGAG
(encoding FUS5);

[0236] the polynucleotide sequence of

(SEQ ID NO: 226)
TGGGGGATGGAGTTGGCAGCGTCTCGGAGGTTCTCCTGGGACCACCACTC
CGCCGGGGGGCCGCCCAGAGTGCCAAGCGTCCGATCCGGCGCCGCCCAAG
TGCAGCCCAAGGACCCGCTCCCGCTCCGCACCCTGGCAGGCTGCCTAGCC
AGGACTGCGCACCTGCGCCCTGGGGCGGAGTCCTTACCCCAACCCCAGCT
TCACTGCACA (encoding FUS8);

[0237] the polynucleotide sequence of

(SEQ ID NO: 346)
CACGTGGTGGGCTATGGCCACCTTGATACTTCCGGGTCATCCTCCTCCTC
CTCCTGGCCC (encoding FUS15);

[0238] the polynucleotide sequence of

(SEQ ID NO: 354)
AACAGCAAGATGGCTTTGAACTCATTAAACTCCATTGATGATGCACAGTT
GACAAGAATTGCCCCTCCAAGATCTCATTGCTGTTTCTGGGAAGTAAACG
CTCCT (encoding P35);

[0239] the polynucleotide sequence of AAAATGCACTTCTCCCTCAAGGAGCACCCACCGCCCCCTTGCCCGCCT (SEQ ID NO: 236) (encoding FUS19); and
[0240] the polynucleotide sequence of

(SEQ ID NO: 224)
CTGTGGTTCCAGAGCAGTGAGCTGTCCCCGACGGGAGCGCCATGGCCCAG
CCGCCGCCCGACGTGGAGGGGGACGACTGTCTCCCCGCGTACCGCCACCT
CTTCTGCCCGGACCTGCTGCGGGACAAAGTGGCCTTCATCACAGGAGGCG
GCTCTGGGATTGGGTTCCGGATTGCTGAGATTTTCATGCGGCACGGCTGC
CATACGG (encoding FUS7).

[0241] In some embodiments, the self-replicating RNA molecule comprises an RNA corresponding to one or more at least 24 nucleotide long contiguous fragments of the one or more polynucleotides, wherein the polynucleotides comprise:
[0242] the polynucleotide sequence of

(SEQ ID NO: 276)
TGGAAATTCGAGATGAGCTACACGGTGGGTGGCCCGCCTCCCCATGTTCA
TGCTAGACCCAGGCATTGGAAAACTGATAGA (encoding AS18);

[0243] the polynucleotide sequence of

(SEQ ID NO: 382)
TATGAAGCAGGGATGACTCTGGGAGGTAAGATACTTTTCTTTCTCTTCCT
CCTCCTTCCTCTCTCCCCCTTCTCCCTCATTTTC (encoding P87);

[0244] the polynucleotide sequence of

(SEQ ID NO: 334)
GATGGCCACTCCTACACATCCAAGGTGAATTGTTTACTCCTTCAAGATGG
GTTCCATGGCTGTGTGAGCATCACCGGGGCAGCTGGAAGAAGAAACCTGA
GCATCTTCCTGTTCTTGATGCTGTGCAAATTGGAGTTCCATGCTTGT
(encoding AS55);

[0245] the polynucleotide sequence of

(SEQ ID NO: 338)
ACAGGGGGCAAAAGCACCTGCTCGGCTCCTGGCCCTCAGTCTCTCCCCTC
CACTCCATTCTCCACCTACCCACAGTGGGTCATTCTGATCACCGAACTG
(encoding AS57);

[0246] the polynucleotide sequence of

(SEQ ID NO: 270)
GTGCTGCGCTTTCTGGACTTAAAGGTGAGATACCTGCACTCT
(encoding AS15);

[0247] the polynucleotide sequence of

(SEQ ID NO: 254)
GACTACTGGGCTCAAAAGGAGAAGGGATCATCTTCATTCCTGCGACCATC
CTGT (encoding AS7);

[0248] the polynucleotide sequence of

(SEQ ID NO: 310)
GTGCCCTTCCGGGAGCTCAAGAACGTGAGTGTCCTGGAGGGGCTCCGTCA
AGGCCGGCTTGGGGGTCCCTGTTCATGTCACTGCCCAAGACCTTCCCAGG
CCAGGCTCACGCCAGTGGATGTGGCAGGTCCCTTCTTGTGTCTGGGGGAT
CCTGGGCTGTTCCCCCCAGTCAAGAGCAGTATC (encoding AS43);

[0249] the polynucleotide sequence of

(SEQ ID NO: 326)
GGCATGGAGTGCACCCTGGGGCAGGTGGGTGCCCCGTCCCCTCGGAGGGA
GGAGGACGGTTGGCGTGGGGGCCACAGCCGATTCAAGGCTGATGTACCAG
CACCGCAGGGACCCTGCTGGGGTGGCCAACCTGGCTCTGCCCCCTCCTCA
GCTCCTCCTGAACAGTCATTATTAGAT (encoding AS51);

[0250] the polynucleotide sequence of

((SEQ ID NO: 272)
GGCAACACCACCCTCCAGCAGCTGGGTGAGGCCTCCCAGGCGCCCTCAGG
CTCCCTCATCCCTCTGAGGCTGCCTCTGCTCTGGGAAGTGAGGGGC
(encoding AS16);

[0251] the polynucleotide sequence of

(SEQ ID NO: 306)
GAGGCCTTCCAGAGGGCCGCTGGTGAGGGCGGCCCGGGCCGCGGTGGGGC
ACGGCGCGGTGCCAGGGTGTTGCAGAGCCCCTTTTGCAGGGCAGGAGCTG
GGGAGTGGTTAGGACATCAGTCCCTCAGG (encoding AS41);

[0252] the polynucleotide sequence of

(SEQ ID NO: 252)
GACTACTGGGCTCAAAAGGAGAAGATCAGCATCCCCAGAACACACCTGTG
T (encoding AS6);

[0253] the polynucleotide sequence of

(SEQ ID NO: 246)
GTTGCTATGATGGTTCCTGATAGACAGGTTCATTATGACTTTGGATTG
(encoding AS3);

[0254] the polynucleotide sequence of

(SEQ ID NO: 262)
GTGCCCTTCCGGGAGCTCAAGAACCAGAGAACAGCACAAGGGGCTCCTG
GGATCCACCACGCGGCTTCCCCCGTTGCTGCCAACCTCTGCGACCCGGC
GAGACACGCACAGCACACACGCATCCCCTGCGGCGCTGGCCAAGTGCGT
GCTGGCCGAGGTCCCGAAGCAGGTGGTGGAGTACTACAGCCACAGAGGC
CTGCCCCCGAGAAGCCTGGGTGTCCCTGCCGGAGAGGCCAGCCCAGGCT
GCACACCGTGAAGATGTGGAGGGCG (encoding AS11);

[0255] the polynucleotide sequence of AAGAGAAGTTTTGCTGTCACGGAGAGGATCATC (SEQ ID NO: 266) (encoding AS13);
[0256] the polynucleotide sequence of

(SEQ ID NO: 318)
TTCAAGAAGTTCGACGGCCCTTGTGGTGAGCGCGGCGGCGGGCGCACGG
CTCGAGCTCTGTGGGCGCGCGGCGACAGCGTCCTGACTCCTGCCCTCGA
CCCCCAGACCCCTGTCAGGGCGCCCTCCCTGACCCGAGCCGCAGCTGCC
GTG (encoding AS47);

[0257] the polynucleotide sequence of

(SEQ ID NO: 256)
CTTGTACTTGGTGTATTGAGCGGGCACAGTGGCTCACGCCTA
(encoding AS8);

[0258] the polynucleotide sequence of

(SEQ ID NO: 278)
CAGTGGCAGCACTACCACCGGTCAGGTGAGGCCGCAGGGACTCCCCTCT
GGAGACCCACAAGAAAC (encoding AS19);

[0259] the polynucleotide sequence of

(SEQ ID NO: 298)
TGCCACCTCTTCCTGCAGCCCCAGGTTGGCACCCCCCCCCCCCACACTG
CCAGTGCTCGAGCCCCCAGTGGTCCACCCCACCCTCATGAAAGTTGCCC
TGCAGGGCGAAGACCTGCGAGAGCTGCGCAGACATGTGCACGCCGACAG
CACGGACTTCCTGGCTGTGAAGAGGCTGGTACAGCGCGTGTTCCCAGCC
TGCACCTGCACCTGCACCAGGCCGCCCTCGGAGCAGGAAGGGGCCGTGG
GTGGGGAGAGGCCTGTGCCCAAGTACCCCCCTCAAGAGGC
(encoding AS37);

[0260] the polynucleotide sequence of AAAATTCAGAATAAAAATTGTCCAGAC (SEQ ID NO: 286) (encoding AS23);
[0261] the polynucleotide sequence of

(SEQ ID NO: 448)
CACTACAAATTAATTCAACAACCCATATCCCTCTTCTCCATCACTGATA
GGCTCCATAAGACGTTCAGTCAGCTGCCCTCGGTCCATCTCTGCTCAAT
CACCTTCCAGTGGGGACACCCGCCCATTTTCTGCTCAACAAATGATATC
TGTGTCACGGCCAACTTCTGCATCTCGGTCACATTCCTTAAACCGTGCT
TCCTCCTACATGAGGCATCTGCCTCACAG (encoding MS1);

[0262] the polynucleotide sequence of

(SEQ ID NO: 450)
AGGACCGCCCTGACACACAATCAGGACTTCTCTATCTACAGGCTCTGTT
GCAAGAGGGGGTCCCTCTGCCACGCTTCCCAGGCCAGATCCCCGGCTTT
CCCGAAGCCGGTCAGACCTCTTCCTGCCCCCATCACCAGAATCACCCCC
CAACTGGGGGGACAATCTGACTCGAGTCAACCCCTTCTCACTACGGGAA
GACCTCAGGGGTGGCAAGATCAAGCTCTTAGACACACCCAGCAAGCCAG
TCCTGCCTCTTGTGCCACCATCACCATTCCCATCCACTCAGCTGCCCTT
GGTGACCACTCCGGAGACCCTGGTCCAGCCTGGGACACCTGCCCGCCGC
TGCCGCTCACTACCCTCATCCCCCGAGCTCCCCCGCCGTATGGAGACAG
CACTGCCAGGTCCTGGCCCTCCCGCTGTGGGCCCCTCGGC
(encoding MS3);

[0263] the polynucleotide sequence of

(SEQ ID NO: 453)
TATGCTTACAAGGACTTTCTCTGGTGTTTTCCTTTTTCTTTAGTTTTTC
TCCAAGAGATTCAAATCTGCTGCCATGTTAGCTGTCTTTGCTGTATCTG
CTGTAGTACACGAATATGCCTTGGCTGTTTGCTTGAGCTTTTTCTATCC
CGTGCTCTTCGTGCTCTTCATGTTCTTTGGAATGGCTTTCAACTTCATT
GTCAA (encoding MS6);

[0264] the polynucleotide sequence of ACCATGCCTGCTATTTTAAAGTTACAGAAGAATTGTCTTCTCTCCTTA (SEQ ID NO: 455) (encoding MS8); and
[0265] the polynucleotide sequence of TATGAAGCAGGGATGACTCTGGGAGAAAAATTCCGGGTTGGCAATTGCAAG CATCTCAAAATGACCAGACCC (SEQ ID NO: 380) (encoding P82), and fragments thereof.

[0266] In some embodiments, the self-replicating RNA molecule comprises an RNA corresponding to one or more polynucleotides selected from the group consisting of:
[0267] the polynucleotide sequence of

(SEQ ID NO: 168)
ATTGCGAGAGAGCTGCATCAGTTCGCTTTTGACCTGCTAATCAAGTCACAC
(encoding M84);

[0268] the polynucleotide sequence of

(SEQ ID NO: 172)
CAGCCCGACTCCTTTGCAGCCTTGCACTCTAGCCTCAATGAACTGGGAGAG
(encoding M86);

[0269] the polynucleotide sequence of

(SEQ ID NO: 20)
TTTGTGCAAGGCAAAGACTGGGGATTAAAGAAATTCATCCGTAGAGATTTT
(encoding M10);

[0270] the polynucleotide sequence of TTTGTGCAAGGCAAAGACTGGGGAGTCAAGAAATTCATCCGTAGAGATTTT (SEQ ID NO: 24) (encoding M12); and
[0271] the polynucleotide sequence of CAGAACCTGCAGAATGGAGGGGGGAGCAGGTCTTCAGCCACACTGCCGGGG CGGCGGCGGCGGCGGTGGCTGCGGCGGCGGCGGCAGCCAATATCAGTAGCT CCTGCGGGGCCCCCTCGCCGACCAAACCAAAAACCAAACCCACCTGGCGGT GCGAGGTGTGTGATTATGAGACCAACGTGGCCAGGAACCTCCGCATTCACA (SEQ ID NO: 178) (encoding FR1);
[0272] and fragments thereof.

[0273] The disclosure also provides self-replicating RNA molecules comprising an RNA corresponding to one or more polynucleotides selected from the group consisting of SEQ ID NOs: 459, 460, 461, 462, 463, 464, 465, 466, 467, 468, 469, 470, 471, 472, 473, 474, 475, 476, 477, 478, 479, 480, 481, 482, 483, 484, 485, 486, 487, 488, 489, 490, 491, 492, 493, 494, 495, 496, 497, 498 and 499, and fragments thereof.

[0274] The disclosure also provides self-replicating RNA molecules comprising an RNA corresponding to one or more polynucleotides selected from the group consisting of SEQ ID NOs: 500, 501, 461, 503, 504, 505, 506, 507, 508, 509, 510, 511, 512, 513, 514, 515, 516, 517, 477, 519, 520, 521, 522, 523, 524, 525, 485, 486, 528, 529, 530, 531, 532, 533, 534, 535, 536, 537, 538, 539, 540, 1000, 1002, and fragments thereof.

[0275] The disclosure also provides self-replicating RNA molecules comprising an RNA encoding a polypeptide of SEQ ID NOs: 541, 543, 550, 552, 554, 555, 556, 557, 558, 559, 623, 624, 625, 626, 1004, or 1005.

[0276] In some embodiments, the fragments comprised in the self-replicating RNA molecule comprise at least 18 nucleotides. In some embodiments, the fragments comprise at least 21 nucleotides. In some embodiments, the fragments comprise at least 24 nucleotides. In some embodiments, the fragments comprise at least 27 nucleotides. In some embodiments, the fragments comprise at least 30 nucleotides. In some embodiments, the fragments comprise at least 33 nucleotides. In some embodiments, the fragments comprise at least 36 nucleotides. In some embodiments, the fragments comprise at least 39 nucleotides. In some embodiments, the fragments comprise at least 42 nucleotides. In some embodiments, the fragments comprise at least 45 nucleotides. In some embodiments, the fragments comprise at least 48 nucleotides. In some embodiments, the fragments comprise at least 51 nucleotides. In some embodiments, the fragments comprise at least 54 nucleotides. In some embodiments, the fragments comprise at least 57 nucleotides. In some embodiments, the fragments comprise at least 60 nucleotides. In some embodiments, the fragments comprise at least 63 nucleotides. In some embodiments, the fragments comprise at least 66 nucleotides. In some embodiments, the fragments comprise at least 69 nucleotides. In some embodiments, the fragments comprise at least 72 nucleotides. In some embodiments, the fragments comprise at least 75 nucleotides. In some embodiments, the fragments comprise about 18 nucleotides. In some embodiments, the fragments comprise about 21 nucleotides. In some embodiments, the fragments comprise about 24 nucleotides. In some embodiments, the fragments comprise about 27 nucleotides. In some embodiments, the fragments comprise about 30 nucleotides. In some embodiments, the fragments comprise about 33 nucleotides. In some embodiments, the fragments comprise about 36 nucleotides. In some embodiments, the fragments comprise about 39 nucleotides. In some embodiments, the fragments comprise about 42 nucleotides. In some embodiments, the fragments comprise about 45 nucleotides. In some embodiments, the fragments comprise about 48 nucleotides. In some embodiments, the fragments comprise about 51 nucleotides. In some embodiments, the fragments comprise about 54 nucleotides. In some embodiments, the fragments comprise about 57 nucleotides. In some embodiments, the fragments comprise about 60 nucleotides. In some embodiments, the fragments comprise about 63 nucleotides. In some embodiments, the fragments comprise about 66 nucleotides. In some embodiments, the fragments comprise about 69 nucleotides. In some embodiments, the fragments comprise about 72 nucleotides. In some embodiments, the fragments comprise about 75 nucleotides. In some embodiments, the fragments comprise about 18-75 nucleotides. In some embodiments, the fragments comprise about 21-75 nucleotides. In some embodiments, the fragments comprise about 24-75 nucleotides. In some embodiments, the fragments comprise about 24-72 nucleotides. In some embodiments, the fragments comprise about 24-69 nucleotides. In some embodiments, the fragments comprise about 24-66 nucleotides. In some embodiments, the fragments comprise about 24-63 nucleotides. In some embodiments, the fragments comprise about 24-60 nucleotides. In some embodiments, the fragments comprise about 24-57 nucleotides. In some embodiments, the fragments comprise about 24-54 nucleotides. In some embodiments, the fragments comprise about 24-51 nucleotides. In some embodiments, the fragments comprise about 24-48 nucleotides. In some embodiments, the fragments comprise about 24-45 nucleotides. In some embodiments, the fragments comprise about 24-42 nucleotides. In some embodiments, the fragments comprise about 27-42 nucleotides. In some embodiments, the fragments comprise about 27-39 nucleotides. In some embodiments, the fragments comprise about 27-36 nucleotides. In some embodiments, the fragments comprise about 27-33 nucleotides. In some embodiments, the fragments comprise about 27-30 nucleotides.

[0277] The self-replicating RNA molecules contain polynucleotides that encode the prostate neoantigens and polypeptides comprising one or more prostate neoantigens described herein. The self-replicating RNA molecules are useful in generating the polypeptides, the vectors, the recombinant viruses, the cells, and the vaccines of the disclosure. The self-replicating RNA molecules may be utilized as therapeutics by delivering the neoantigens to a subject having a prostate cancer using various technologies, including viral vectors as described herein or other delivery technologies as also described herein. The one or more neoantigens (e.g. polypeptides) may be incorporated into the vaccine in any order using standard cloning methods.

[0278] The disclosure also provides a self-replicating RNA molecule comprising an RNA encoding the polypeptide of SEQ ID NO: 1 or a fragment thereof. In some embodiments, the self-replicating RNA molecule comprises an RNA corresponding to the polynucleotide of SEQ ID NO: 2 or a fragment thereof.

[0279] The disclosure also provides a self-replicating RNA molecule comprising an RNA encoding the polypeptide of SEQ ID NO: 3 or a fragment thereof. In some embodiments, the self-replicating RNA molecule comprises an RNA corresponding to the polynucleotide of SEQ ID NO: 4 or a fragment thereof.

[0280] The disclosure also provides a self-replicating RNA molecule comprising an RNA encoding the polypeptide of SEQ ID NO: 5 or a fragment thereof. In some embodiments, the self-replicating RNA molecule comprises an RNA corresponding to the polynucleotide of SEQ ID NO: 6 or a fragment thereof.

[0281] The disclosure also provides a self-replicating RNA molecule comprising an RNA encoding the polypeptide of SEQ ID NO: 7 or a fragment thereof. In some embodiments, the self-replicating RNA molecule comprises an RNA corresponding to the polynucleotide of SEQ ID NO: 8 or a fragment thereof.

[0282] The disclosure also provides a self-replicating RNA molecule comprising an RNA encoding the polypeptide of SEQ ID NO: 9 or a fragment thereof. In some embodiments, the self-replicating RNA molecule comprises an RNA corresponding to the polynucleotide of SEQ ID NO: 10 or a fragment thereof.

[0283] The disclosure also provides a self-replicating RNA molecule comprising an RNA encoding the polypeptide of SEQ ID NO: 11 or a fragment thereof. In some embodiments, the self-replicating RNA molecule comprises an RNA corresponding to the polynucleotide of SEQ ID NO: 12 or a fragment thereof.

[0284] The disclosure also provides a self-replicating RNA molecule comprising an RNA encoding the polypeptide of SEQ ID NO: 13 or a fragment thereof. In some embodiments, the self-replicating RNA molecule comprises an RNA corresponding to the polynucleotide of SEQ ID NO: 14 or a fragment thereof.

[0285] The disclosure also provides a self-replicating RNA molecule comprising an RNA encoding the polypeptide of SEQ ID NO: 15 or a fragment thereof. In some embodiments, the self-replicating RNA molecule comprises an RNA corresponding to the polynucleotide of SEQ ID NO: 16 or a fragment thereof.

[0286] The disclosure also provides a self-replicating RNA molecule comprising an RNA encoding the polypeptide of SEQ ID NO: 17 or a fragment thereof. In some embodiments, the self-replicating RNA molecule comprises an RNA corresponding to the polynucleotide of SEQ ID NO: 18 or a fragment thereof.

[0287] The disclosure also provides a self-replicating RNA molecule comprising an RNA encoding the polypeptide of SEQ ID NO: 19 or a fragment thereof. In some embodiments, the self-replicating RNA molecule comprises an RNA corresponding to the polynucleotide of SEQ ID NO: 20 or a fragment thereof. In some embodiments, the self-replicating RNA molecule comprises an RNA corresponding to the polynucleotide of SEQ ID NO: 497 or a fragment thereof. In some embodiments, the self-replicating RNA molecule comprises an RNA corresponding to the polynucleotide of SEQ ID NO: 538 or a fragment thereof.

[0288] The disclosure also provides a self-replicating RNA molecule comprising an RNA encoding the polypeptide of SEQ ID NO: 21 or a fragment thereof. In some embodiments, the self-replicating RNA molecule comprises an RNA corresponding to the polynucleotide of SEQ ID NO: 22 or a fragment thereof.

[0289] The disclosure also provides a self-replicating RNA molecule comprising an RNA encoding the polypeptide of SEQ ID NO: 23 or a fragment thereof. In some embodiments, the self-replicating RNA molecule comprises an RNA corresponding to the polynucleotide of SEQ ID NO: 24 or a fragment thereof. In some embodiments, the self-replicating RNA molecule comprises an RNA corresponding to the polynucleotide of SEQ ID NO: 498 or a fragment thereof. In some embodiments, the self-replicating RNA molecule comprises an RNA corresponding to the polynucleotide of SEQ ID NO: 539 or a fragment thereof.

[0290] The disclosure also provides a self-replicating RNA molecule comprising an RNA encoding the polypeptide of SEQ ID NO: 25 or a fragment thereof. In some embodiments, the self-replicating RNA molecule comprises an RNA corresponding to the polynucleotide of SEQ ID NO: 26 or a fragment thereof.

[0291] The disclosure also provides a self-replicating RNA molecule comprising an RNA encoding the polypeptide of SEQ ID NO: 27 or a fragment thereof. In some embodiments, the self-replicating RNA molecule comprises an RNA corresponding to the polynucleotide of SEQ ID NO: 28 or a fragment thereof.

[0292] The disclosure also provides a self-replicating RNA molecule comprising an RNA encoding the polypeptide of SEQ ID NO: 29 or a fragment thereof. In some embodiments, the self-replicating RNA molecule comprises an RNA corresponding to the polynucleotide of SEQ ID NO: 30 or a fragment thereof.

[0293] The disclosure also provides a self-replicating RNA molecule comprising an RNA encoding the polypeptide of SEQ ID NO: 31 or a fragment thereof. In some embodiments, the self-replicating RNA molecule comprises an RNA corresponding to the polynucleotide of SEQ ID NO: 32 or a fragment thereof.

[0294] The disclosure also provides a self-replicating RNA molecule comprising an RNA encoding the polypeptide of SEQ ID NO: 33 or a fragment thereof. In some embodiments, the self-replicating RNA molecule comprises an RNA corresponding to the polynucleotide of SEQ ID NO: 34 or a fragment thereof.

[0295] The disclosure also provides a self-replicating RNA molecule comprising an RNA encoding the polypeptide of SEQ ID NO: 35 or a fragment thereof. In some embodiments, the self-replicating RNA molecule comprises an RNA corresponding to the polynucleotide of SEQ ID NO: 36 or a fragment thereof.

[0296] The disclosure also provides a self-replicating RNA molecule comprising an RNA encoding the polypeptide of SEQ ID NO: 37 or a fragment thereof. In some embodiments, the self-replicating RNA molecule comprises an RNA corresponding to the polynucleotide of SEQ ID NO: 38 or a fragment thereof.

[0297] The disclosure also provides a self-replicating RNA molecule comprising an RNA encoding the polypeptide of SEQ ID NO: 39 or a fragment thereof. In some embodiments, the self-replicating RNA molecule comprises an RNA corresponding to the polynucleotide of SEQ ID NO: 40 or a fragment thereof.

[0298] The disclosure also provides a self-replicating RNA molecule comprising an RNA encoding the polypeptide of SEQ ID NO: 41 or a fragment thereof. In some embodiments, the self-replicating RNA molecule comprises an RNA corresponding to the polynucleotide of SEQ ID NO: 42 or a fragment thereof.

[0299] The disclosure also provides a self-replicating RNA molecule comprising an RNA encoding the polypeptide of SEQ ID NO: 43 or a fragment thereof. In some embodiments, the self-replicating RNA molecule comprises an RNA corresponding to the polynucleotide of SEQ ID NO: 44 or a fragment thereof.

[0300] The disclosure also provides a self-replicating RNA molecule comprising an RNA encoding the polypeptide of SEQ ID NO: 45 or a fragment thereof. In some embodiments, the self-replicating RNA molecule comprises an RNA corresponding to the polynucleotide of SEQ ID NO: 46 or a fragment thereof.

[0301] The disclosure also provides a self-replicating RNA molecule comprising an RNA encoding the polypeptide of SEQ ID NO: 47 or a fragment thereof. In some embodiments, the self-replicating RNA molecule comprises an RNA corresponding to the polynucleotide of SEQ ID NO: 48 or a fragment thereof.

[0302] The disclosure also provides a self-replicating RNA molecule comprising an RNA encoding the polypeptide of SEQ ID NO: 49 or a fragment thereof. In some embodiments, the self-replicating RNA molecule comprises an RNA corresponding to the polynucleotide of SEQ ID NO: 50 or a fragment thereof.

[0303] The disclosure also provides a self-replicating RNA molecule comprising an RNA encoding the polypeptide of SEQ ID NO: 51 or a fragment thereof. In some embodiments, the self-replicating RNA molecule comprises an RNA corresponding to the polynucleotide of SEQ ID NO: 52 or a fragment thereof.

[0304] The disclosure also provides a self-replicating RNA molecule comprising an RNA encoding the polypeptide of SEQ ID NO: 53 or a fragment thereof. In some embodiments, the self-replicating RNA molecule comprises an RNA corresponding to the polynucleotide of SEQ ID NO: 54 or a fragment thereof.

[0305] The disclosure also provides a self-replicating RNA molecule comprising an RNA encoding the polypeptide of SEQ ID NO: 55 or a fragment thereof. In some embodiments, the self-replicating RNA molecule comprises an RNA corresponding to the polynucleotide of SEQ ID NO: 56 or a fragment thereof.

[0306] The disclosure also provides a self-replicating RNA molecule comprising an RNA encoding the polypeptide of SEQ ID NO: 57 or a fragment thereof. In some embodiments, the self-replicating RNA molecule comprises an RNA corresponding to the polynucleotide of SEQ ID NO: 58 or a fragment thereof.

[0307] The disclosure also provides a self-replicating RNA molecule comprising an RNA encoding the polypeptide of SEQ ID NO: 59 or a fragment thereof. In some embodiments, the self-replicating RNA molecule comprises an RNA corresponding to the polynucleotide of SEQ ID NO: 60 or a fragment thereof.

[0308] The disclosure also provides a self-replicating RNA molecule comprising an RNA encoding the polypeptide of SEQ ID NO: 61 or a fragment thereof. In some embodiments, the self-replicating RNA molecule comprises an RNA corresponding to the polynucleotide of SEQ ID NO: 62 or a fragment thereof.

[0309] The disclosure also provides a self-replicating RNA molecule comprising an RNA encoding the polypeptide of SEQ ID NO: 63 or a fragment thereof. In some embodiments, the self-replicating RNA molecule comprises an RNA corresponding to the polynucleotide of SEQ ID NO: 64 or a fragment thereof.

[0310] The disclosure also provides a self-replicating RNA molecule comprising an RNA encoding the polypeptide of SEQ ID NO: 65 or a fragment thereof. In some embodiments, the self-replicating RNA molecule comprises an RNA corresponding to the polynucleotide of SEQ ID NO: 66 or a fragment thereof.

[0311] The disclosure also provides a self-replicating RNA molecule comprising an RNA encoding the polypeptide of SEQ ID NO: 67 or a fragment thereof. In some embodiments, the self-replicating RNA molecule comprises an RNA corresponding to the polynucleotide of SEQ ID NO: 68 or a fragment thereof.

[0312] The disclosure also provides a self-replicating RNA molecule comprising an RNA encoding the polypeptide of SEQ ID NO: 69 or a fragment thereof. In some embodiments, the self-replicating RNA molecule comprises an RNA corresponding to the polynucleotide of SEQ ID NO: 70 or a fragment thereof.

[0313] The disclosure also provides a self-replicating RNA molecule comprising an RNA encoding the polypeptide of SEQ ID NO: 71 or a fragment thereof. In some embodiments, the self-replicating RNA molecule comprises an RNA corresponding to the polynucleotide of SEQ ID NO: 72 or a fragment thereof.

[0314] The disclosure also provides a self-replicating RNA molecule comprising an RNA encoding the polypeptide of SEQ ID NO: 73 or a fragment thereof. In some embodiments, the self-replicating RNA molecule comprises an RNA corresponding to the polynucleotide of SEQ ID NO: 74 or a fragment thereof.

[0315] The disclosure also provides a self-replicating RNA molecule comprising an RNA encoding the polypeptide of SEQ ID NO: 75 or a fragment thereof. In some embodiments, the self-replicating RNA molecule comprises an RNA corresponding to the polynucleotide of SEQ ID NO: 76 or a fragment thereof.

[0316] The disclosure also provides a self-replicating RNA molecule comprising an RNA encoding the polypeptide of SEQ ID NO: 77 or a fragment thereof. In some embodiments, the self-replicating RNA molecule comprises an RNA corresponding to the polynucleotide of SEQ ID NO: 78 or a fragment thereof.

[0317] The disclosure also provides a self-replicating RNA molecule comprising an RNA encoding the polypeptide of SEQ ID NO: 79 or a fragment thereof. In some embodiments, the self-replicating RNA molecule comprises an RNA corresponding to the polynucleotide of SEQ ID NO: 80 or a fragment thereof.

[0318] The disclosure also provides a self-replicating RNA molecule comprising an RNA encoding the polypeptide of SEQ ID NO: 81 or a fragment thereof. In some embodiments, the self-replicating RNA molecule comprises an RNA corresponding to the polynucleotide of SEQ ID NO: 82 or a fragment thereof.

[0319] The disclosure also provides a self-replicating RNA molecule comprising an RNA encoding the polypeptide of SEQ ID NO: 83 or a fragment thereof. In some embodiments, the self-replicating RNA molecule comprises an RNA corresponding to the polynucleotide of SEQ ID NO: 84 or a fragment thereof.

[0320] The disclosure also provides a self-replicating RNA molecule comprising an RNA encoding the polypeptide of SEQ ID NO: 85 or a fragment thereof. In some embodiments, the self-replicating RNA molecule comprises an RNA corresponding to the polynucleotide of SEQ ID NO: 86 or a fragment thereof.

[0321] The disclosure also provides a self-replicating RNA molecule comprising an RNA encoding the polypeptide of SEQ ID NO: 87 or a fragment thereof. In some embodiments, the self-replicating RNA molecule comprises an RNA corresponding to the polynucleotide of SEQ ID NO: 88 or a fragment thereof.

[0322] The disclosure also provides a self-replicating RNA molecule comprising an RNA encoding the polypeptide of SEQ ID NO: 89 or a fragment thereof. In some embodiments, the self-replicating RNA molecule comprises an RNA corresponding to the polynucleotide of SEQ ID NO: 90 or a fragment thereof.

[0323] The disclosure also provides a self-replicating RNA molecule comprising an RNA encoding the polypeptide of SEQ ID NO: 91 or a fragment thereof. In some embodiments, the self-replicating RNA molecule comprises an RNA corresponding to the polynucleotide of SEQ ID NO: 92 or a fragment thereof.

[0324] The disclosure also provides a self-replicating RNA molecule comprising an RNA encoding the polypeptide of SEQ ID NO: 93 or a fragment thereof. In some embodiments, the self-replicating RNA molecule comprises an RNA corresponding to the polynucleotide of SEQ ID NO: 94 or a fragment thereof.

[0325] The disclosure also provides a self-replicating RNA molecule comprising an RNA encoding the polypeptide of SEQ ID NO: 95 or a fragment thereof. In some embodiments, the self-replicating RNA molecule comprises an RNA corresponding to the polynucleotide of SEQ ID NO: 96 or a fragment thereof.

[0326] The disclosure also provides a self-replicating RNA molecule comprising an RNA encoding the polypeptide of SEQ ID NO: 97 or a fragment thereof. In some embodiments, the self-replicating RNA molecule comprises an RNA corresponding to the polynucleotide of SEQ ID NO: 98 or a fragment thereof.

[0327] The disclosure also provides a self-replicating RNA molecule comprising an RNA encoding the polypeptide of SEQ ID NO: 99 or a fragment thereof. In some embodiments, the self-replicating RNA molecule comprises an RNA corresponding to the polynucleotide of SEQ ID NO: 100 or a fragment thereof.

[0328] The disclosure also provides a self-replicating RNA molecule comprising an RNA encoding the polypeptide of SEQ ID NO: 101 or a fragment thereof. In some embodiments, the self-replicating RNA molecule comprises an RNA corresponding to the polynucleotide of SEQ ID NO: 102 or a fragment thereof.

[0329] The disclosure also provides a self-replicating RNA molecule comprising an RNA encoding the polypeptide of SEQ ID NO: 103 or a fragment thereof. In some embodiments, the self-replicating RNA molecule comprises an RNA corresponding to the polynucleotide of SEQ ID NO: 104 or a fragment thereof.

[0330] The disclosure also provides a self-replicating RNA molecule comprising an RNA encoding the polypeptide of SEQ ID NO: 105 or a fragment thereof. In some embodiments, the self-replicating RNA molecule comprises an RNA corresponding to the polynucleotide of SEQ ID NO: 106 or a fragment thereof.

[0331] The disclosure also provides a self-replicating RNA molecule comprising an RNA encoding the polypeptide of SEQ ID NO: 107 or a fragment thereof. In some embodiments, the self-replicating RNA molecule comprises an RNA corresponding to the polynucleotide of SEQ ID NO: 108 or a fragment thereof.

[0332] The disclosure also provides a self-replicating RNA molecule comprising an RNA encoding the polypeptide of SEQ ID NO: 109 or a fragment thereof. In some embodiments, the self-replicating RNA molecule comprises an RNA corresponding to the polynucleotide of SEQ ID NO: 110 or a fragment thereof.

[0333] The disclosure also provides a self-replicating RNA molecule comprising an RNA encoding the polypeptide of SEQ ID NO: 111 or a fragment thereof. In some embodiments, the self-replicating RNA molecule comprises an RNA corresponding to the polynucleotide of SEQ ID NO: 112 or a fragment thereof.

[0334] The disclosure also provides a self-replicating RNA molecule comprising an RNA encoding the polypeptide of SEQ ID NO: 113 or a fragment thereof. In some embodiments, the self-replicating RNA molecule comprises an RNA corresponding to the polynucleotide of SEQ ID NO: 114 or a fragment thereof.

[0335] The disclosure also provides a self-replicating RNA molecule comprising an RNA encoding the polypeptide of SEQ ID NO: 115 or a fragment thereof. In some embodiments, the self-replicating RNA molecule comprises an RNA corresponding to the polynucleotide of SEQ ID NO: 116 or a fragment thereof.

[0336] The disclosure also provides a self-replicating RNA molecule comprising an RNA encoding the polypeptide of SEQ ID NO: 117 or a fragment thereof. In some embodiments, the self-replicating RNA molecule comprises an RNA corresponding to the polynucleotide of SEQ ID NO: 118 or a fragment thereof.

[0337] The disclosure also provides a self-replicating RNA molecule comprising an RNA encoding the polypeptide of SEQ ID NO: 119 or a fragment thereof. In some embodiments, the self-replicating RNA molecule comprises an RNA corresponding to the polynucleotide of SEQ ID NO: 120 or a fragment thereof.

[0338] The disclosure also provides a self-replicating RNA molecule comprising an RNA encoding the polypeptide of SEQ ID NO: 121 or a fragment thereof. In some embodiments, the self-replicating RNA molecule comprises an RNA corresponding to the polynucleotide of SEQ ID NO: 122 or a fragment thereof.

[0339] The disclosure also provides a self-replicating RNA molecule comprising an RNA encoding the polypeptide of SEQ ID NO: 123 or a fragment thereof. In some embodiments, the self-replicating RNA molecule comprises an RNA corresponding to the polynucleotide of SEQ ID NO: 124 or a fragment thereof.

[0340] The disclosure also provides a self-replicating RNA molecule comprising an RNA encoding the polypeptide of SEQ ID NO: 125 or a fragment thereof. In some embodiments, the self-replicating RNA molecule comprises an RNA corresponding to the polynucleotide of SEQ ID NO: 126 or a fragment thereof.

[0341] The disclosure also provides a self-replicating RNA molecule comprising an RNA encoding the polypeptide of SEQ ID NO: 127 or a fragment thereof. In some embodiments, the self-replicating RNA molecule comprises an RNA corresponding to the polynucleotide of SEQ ID NO: 128 or a fragment thereof.

[0342] The disclosure also provides a self-replicating RNA molecule comprising an RNA encoding the polypeptide of SEQ ID NO: 129 or a fragment thereof. In some embodiments, the self-replicating RNA molecule comprises an RNA corresponding to the polynucleotide of SEQ ID NO: 130 or a fragment thereof.

[0343] The disclosure also provides a self-replicating RNA molecule comprising an RNA encoding the polypeptide of SEQ ID NO: 131 or a fragment thereof. In some embodiments, the self-replicating RNA molecule comprises an RNA corresponding to the polynucleotide of SEQ ID NO: 132 or a fragment thereof.

[0344] The disclosure also provides a self-replicating RNA molecule comprising an RNA encoding the polypeptide of SEQ ID NO: 133 or a fragment thereof. In some embodiments, the self-replicating RNA molecule comprises an RNA corresponding to the polynucleotide of SEQ ID NO: 134 or a fragment thereof.

[0345] The disclosure also provides a self-replicating RNA molecule comprising an RNA encoding the polypeptide of SEQ ID NO: 135 or a fragment thereof. In some embodiments, the self-replicating RNA molecule comprises an RNA corresponding to the polynucleotide of SEQ ID NO: 136 or a fragment thereof.

[0346] The disclosure also provides a self-replicating RNA molecule comprising an RNA encoding the polypeptide of SEQ ID NO: 137 or a fragment thereof. In some embodiments, the self-replicating RNA molecule comprises an RNA corresponding to the polynucleotide of SEQ ID NO: 138 or a fragment thereof.

[0347] The disclosure also provides a self-replicating RNA molecule comprising an RNA encoding the polypeptide of SEQ ID NO: 139 or a fragment thereof. In some embodiments, the self-replicating RNA molecule comprises an RNA corresponding to the polynucleotide of SEQ ID NO: 140 or a fragment thereof.

[0348] The disclosure also provides a self-replicating RNA molecule comprising an RNA encoding the polypeptide of SEQ ID NO: 141 or a fragment thereof. In some embodiments, the self-replicating RNA molecule comprises an RNA corresponding to the polynucleotide of SEQ ID NO: 142 or a fragment thereof.

[0349] The disclosure also provides a self-replicating RNA molecule comprising an RNA encoding the polypeptide of SEQ ID NO: 143 or a fragment thereof. In some embodiments, the self-replicating RNA molecule comprises an RNA corresponding to the polynucleotide of SEQ ID NO: 144 or a fragment thereof.

[0350] The disclosure also provides a self-replicating RNA molecule comprising an RNA encoding the polypeptide of SEQ ID NO: 145 or a fragment thereof. In some embodiments, the self-replicating RNA molecule comprises an RNA corresponding to the polynucleotide of SEQ ID NO: 146 or a fragment thereof.

[0351] The disclosure also provides a self-replicating RNA molecule comprising an RNA encoding the polypeptide of SEQ ID NO: 147 or a fragment thereof. In some embodiments, the self-replicating RNA molecule comprises an RNA corresponding to the polynucleotide of SEQ ID NO: 148 or a fragment thereof.

[0352] The disclosure also provides a self-replicating RNA molecule comprising an RNA encoding the polypeptide of SEQ ID NO: 149 or a fragment thereof. In some embodiments, the self-replicating RNA molecule comprises an RNA corresponding to the polynucleotide of SEQ ID NO: 150 or a fragment thereof.

[0353] The disclosure also provides a self-replicating RNA molecule comprising an RNA encoding the polypeptide of SEQ ID NO: 151 or a fragment thereof. In some embodiments, the self-replicating RNA molecule comprises an RNA corresponding to the polynucleotide of SEQ ID NO: 152 or a fragment thereof.

[0354] The disclosure also provides a self-replicating RNA molecule comprising an RNA encoding the polypeptide of SEQ ID NO: 153 or a fragment thereof. In some embodiments, the self-replicating RNA molecule comprises an RNA corresponding to the polynucleotide of SEQ ID NO: 154 or a fragment thereof.

[0355] The disclosure also provides a self-replicating RNA molecule comprising an RNA encoding the polypeptide of SEQ ID NO: 155 or a fragment thereof. In some embodiments, the self-replicating RNA molecule comprises an RNA corresponding to the polynucleotide of SEQ ID NO: 156 or a fragment thereof.

[0356] The disclosure also provides a self-replicating RNA molecule comprising an RNA encoding the polypeptide of SEQ ID NO: 157 or a fragment thereof. In some embodiments, the self-replicating RNA molecule comprises an RNA corresponding to the polynucleotide of SEQ ID NO: 158 or a fragment thereof.

[0357] The disclosure also provides a self-replicating RNA molecule comprising an RNA encoding the polypeptide of SEQ ID NO: 159 or a fragment thereof. In some embodiments, the self-replicating RNA molecule comprises an RNA corresponding to the polynucleotide of SEQ ID NO: 160 or a fragment thereof.

[0358] The disclosure also provides a self-replicating RNA molecule comprising an RNA encoding the polypeptide of SEQ ID NO: 161 or a fragment thereof. In some embodiments, the self-replicating RNA molecule comprises an RNA corresponding to the polynucleotide of SEQ ID NO: 162 or a fragment thereof.

[0359] The disclosure also provides a self-replicating RNA molecule comprising an RNA encoding the polypeptide of SEQ ID NO: 163 or a fragment thereof. In some embodiments, the self-replicating RNA molecule comprises an RNA corresponding to the polynucleotide of SEQ ID NO: 164 or a fragment thereof.

[0360] The disclosure also provides a self-replicating RNA molecule comprising an RNA encoding the polypeptide of SEQ ID NO: 165 or a fragment thereof. In some embodiments, the self-replicating RNA molecule comprises an RNA corresponding to the polynucleotide of SEQ ID NO: 166 or a fragment thereof.

[0361] The disclosure also provides a self-replicating RNA molecule comprising an RNA encoding the polypeptide of SEQ ID NO: 167 or a fragment thereof. In some embodiments, the self-replicating RNA molecule comprises an RNA corresponding to the polynucleotide of SEQ ID NO: 168 or a fragment thereof. In some embodiments, the self-replicating RNA molecule comprises an RNA corresponding to the polynucleotide of SEQ ID NO: 495 or a fragment thereof. In some embodiments, the self-replicating RNA molecule comprises an RNA corresponding to the polynucleotide of SEQ ID NO: 536 or a fragment thereof.

[0362] The disclosure also provides a self-replicating RNA molecule comprising an RNA encoding the polypeptide of SEQ ID NO: 169 or a fragment thereof. In some embodiments, the self-replicating RNA molecule comprises an RNA corresponding to the polynucleotide of SEQ ID NO: 170 or a fragment thereof.

[0363] The disclosure also provides a self-replicating RNA molecule comprising an RNA encoding the polypeptide of SEQ ID NO: 171 or a fragment thereof. In some embodiments, the self-replicating RNA molecule comprises an RNA corresponding to the polynucleotide of SEQ ID NO: 172 or a fragment thereof. In some embodiments, the self-replicating RNA molecule comprises an RNA corresponding to the polynucleotide of SEQ ID NO: 496 or a fragment thereof. In some embodiments, the self-replicating RNA molecule comprises an RNA corresponding to the polynucleotide of SEQ ID NO: 537 or a fragment thereof.

[0364] The disclosure also provides a self-replicating RNA molecule comprising an RNA encoding the polypeptide of SEQ ID NO: 173 or a fragment thereof. In some embodiments, the self-replicating RNA molecule comprises an RNA corresponding to the polynucleotide of SEQ ID NO: 174 or a fragment thereof.

[0365] The disclosure also provides a self-replicating RNA molecule comprising an RNA encoding the polypeptide of SEQ ID NO: 175 or a fragment thereof. In some embodiments, the self-replicating RNA molecule comprises an RNA corresponding to the polynucleotide of SEQ ID NO: 176 or a fragment thereof.

[0366] The disclosure also provides a self-replicating RNA molecule comprising an RNA encoding the polypeptide of SEQ ID NO: 177 or a fragment thereof. In some embodiments, the self-replicating RNA molecule comprises an RNA corresponding to the polynucleotide of SEQ ID NO: 178 or a fragment thereof. In some embodiments, the self-replicating RNA molecule comprises an RNA corresponding to the polynucleotide of SEQ ID NO: 499 or a fragment thereof. In some embodiments, the self-replicating RNA molecule comprises an RNA corresponding to the polynucleotide of SEQ ID NO: 540 or a fragment thereof.

[0367] The disclosure also provides a self-replicating RNA molecule comprising an RNA encoding the polypeptide of SEQ ID NO: 179 or a fragment thereof. In some embodiments, the self-replicating RNA molecule comprises an RNA corresponding to the polynucleotide of SEQ ID NO: 180 or a fragment thereof.

[0368] The disclosure also provides a self-replicating RNA molecule comprising an RNA encoding the polypeptide of SEQ ID NO: 181 or a fragment thereof. In some embodiments, the self-replicating RNA molecule comprises an RNA corresponding to the polynucleotide of SEQ ID NO: 182 or a fragment thereof.

[0369] The disclosure also provides a self-replicating RNA molecule comprising an RNA encoding the polypeptide of SEQ ID NO: 183 or a fragment thereof. In some embodiments, the self-replicating RNA molecule comprises an RNA corresponding to the polynucleotide of SEQ ID NO: 184 or a fragment thereof.

[0370] The disclosure also provides a self-replicating RNA molecule comprising an RNA encoding the polypeptide of SEQ ID NO: 185 or a fragment thereof. In some embodiments, the self-replicating RNA molecule comprises an RNA corresponding to the polynucleotide of SEQ ID NO: 186 or a fragment thereof.

[0371] The disclosure also provides a self-replicating RNA molecule comprising an RNA encoding the polypeptide of SEQ ID NO: 187 or a fragment thereof. In some embodiments, the self-replicating RNA molecule comprises an RNA corresponding to the polynucleotide of SEQ ID NO: 188 or a fragment thereof.

[0372] The disclosure also provides a self-replicating RNA molecule comprising an RNA encoding the polypeptide of SEQ ID NO: 189 or a fragment thereof. In some embodiments, the self-replicating RNA molecule comprises an RNA corresponding to the polynucleotide of SEQ ID NO: 190 or a fragment thereof.

[0373] The disclosure also provides a self-replicating RNA molecule comprising an RNA encoding the polypeptide of SEQ ID NO: 191 or a fragment thereof. In some embodiments, the self-replicating RNA molecule comprises an RNA corresponding to the polynucleotide of SEQ ID NO: 192 or a fragment thereof.

[0374] The disclosure also provides a self-replicating RNA molecule comprising an RNA encoding the polypeptide of SEQ ID NO: 193 or a fragment thereof. In some embodiments, the self-replicating RNA molecule comprises an RNA corresponding to the polynucleotide of SEQ ID NO: 194 or a fragment thereof.

[0375] The disclosure also provides a self-replicating RNA molecule comprising an RNA encoding the polypeptide of SEQ ID NO: 195 or a fragment thereof. In some embodiments, the self-replicating RNA molecule comprises an RNA corresponding to the polynucleotide of SEQ ID NO: 196 or a fragment thereof.

[0376] The disclosure also provides a self-replicating RNA molecule comprising an RNA encoding the polypeptide of SEQ ID NO: 197 or a fragment thereof. In some embodiments, the self-replicating RNA molecule comprises an RNA corresponding to the polynucleotide of SEQ ID NO: 198 or a fragment thereof.

[0377] The disclosure also provides a self-replicating RNA molecule comprising an RNA encoding the polypeptide of SEQ ID NO: 199 or a fragment thereof. In some embodiments, the self-replicating RNA molecule comprises an RNA corresponding to the polynucleotide of SEQ ID NO: 200 or a fragment thereof.

[0378] The disclosure also provides a self-replicating RNA molecule comprising an RNA encoding the polypeptide of SEQ ID NO: 201 or a fragment thereof. In some embodiments, the self-replicating RNA molecule comprises an RNA corresponding to the polynucleotide of SEQ ID NO: 202 or a fragment thereof.

[0379] The disclosure also provides a self-replicating RNA molecule comprising an RNA encoding the polypeptide of SEQ ID NO: 203 or a fragment thereof. In some embodiments, the self-replicating RNA molecule comprises an RNA corresponding to the polynucleotide of SEQ ID NO: 204 or a fragment thereof.

[0380] The disclosure also provides a self-replicating RNA molecule comprising an RNA encoding the polypeptide of SEQ ID NO: 205 or a fragment thereof. In some embodiments, the self-replicating RNA molecule comprises an RNA corresponding to the polynucleotide of SEQ ID NO: 206 or a fragment thereof.

[0381] The disclosure also provides a self-replicating RNA molecule comprising an RNA encoding the polypeptide of SEQ ID NO: 207 or a fragment thereof. In some embodiments, the self-replicating RNA molecule comprises an RNA corresponding to the polynucleotide of SEQ ID NO: 208 or a fragment thereof.

[0382] The disclosure also provides a self-replicating RNA molecule comprising an RNA encoding the polypeptide of SEQ ID NO: 209 or a fragment thereof. In some embodiments, the self-replicating RNA molecule comprises an RNA corresponding to the polynucleotide of SEQ ID NO: 210 or a fragment thereof.

[0383] The disclosure also provides a self-replicating RNA molecule comprising an RNA encoding the polypeptide of SEQ ID NO: 211 or a fragment thereof. In some embodiments, the self-replicating RNA molecule comprises an RNA corresponding to the polynucleotide of SEQ ID NO: 212 or a fragment thereof. In some embodiments, the self-replicating RNA molecule comprises an RNA corresponding to the polynucleotide of SEQ ID NO: 484 or a fragment thereof. In some embodiments, the self-replicating RNA molecule comprises an RNA corresponding to the polynucleotide of SEQ ID NO: 525 or a fragment thereof.

[0384] The disclosure also provides a self-replicating RNA molecule comprising an RNA encoding the polypeptide of SEQ ID NO: 213 or a fragment thereof. In some embodiments, the self-replicating RNA molecule comprises an RNA corresponding to the polynucleotide of SEQ ID NO: 214 or a fragment thereof. In some embodiments, the self-replicating RNA molecule comprises an RNA corresponding to the polynucleotide of SEQ ID NO: 486 or a fragment thereof.

[0385] The disclosure also provides a self-replicating RNA molecule comprising an RNA encoding the polypeptide of SEQ ID NO: 215 or a fragment thereof. In some embodiments, the self-replicating RNA molecule comprises an RNA corresponding to the polynucleotide of SEQ ID NO: 216 or a fragment thereof. In some embodiments, the self-replicating RNA molecule comprises an RNA corresponding to the polynucleotide of SEQ ID NO: 487 or a fragment thereof. In some the self-replicating RNA molecule comprises an RNA corresponding to the polynucleotide of SEQ ID NO: 528 or a fragment thereof.

[0386] The disclosure also provides a self-replicating RNA molecule comprising an RNA encoding the polypeptide of SEQ ID NO: 217 or a fragment thereof. In some embodiments, the self-replicating RNA molecule comprises an RNA corresponding to the polynucleotide of SEQ ID NO: 218 or a fragment thereof.

[0387] The disclosure also provides a self-replicating RNA molecule comprising an RNA encoding the polypeptide of SEQ ID NO: 219 or a fragment thereof. In some embodiments, the self-replicating RNA molecule comprises an RNA corresponding to the polynucleotide of SEQ ID NO: 220 or a fragment thereof. In some embodiments, the self-replicating RNA molecule comprises an RNA corresponding to the polynucleotide of SEQ ID NO: 489 or a fragment thereof. In some embodiments, the self-replicating RNA molecule comprises an RNA corresponding to the polynucleotide of SEQ ID NO: 530 or a fragment thereof.

[0388] The disclosure also provides a self-replicating RNA molecule comprising an RNA encoding the polypeptide of SEQ ID NO: 221 or a fragment thereof. In some embodiments, the self-replicating RNA molecule comprises an RNA corresponding to the polynucleotide of SEQ ID NO: 222 or a fragment thereof. In some embodiments, the self-replicating RNA molecule comprises an RNA corresponding to the polynucleotide of SEQ ID NO: 488 or a fragment thereof. In some embodiments, the self-replicating RNA molecule comprises an RNA corresponding to the polynucleotide of SEQ ID NO: 529 or a fragment thereof.

[0389] The disclosure also provides a self-replicating RNA molecule comprising an RNA encoding the polypeptide of SEQ ID NO: 223 or a fragment thereof. In some embodiments, the self-replicating RNA molecule comprises an RNA corresponding to the polynucleotide of SEQ ID NO: 224 or a fragment thereof. In some embodiments, the self-replicating RNA molecule comprises an RNA corresponding to the polynucleotide of SEQ ID NO: 494 or a fragment thereof. In some embodiments, self-replicating RNA molecule comprises an RNA corresponding to the polynucleotide of SEQ ID NO: 535 or a fragment thereof.

[0390] The disclosure also provides a self-replicating RNA molecule comprising an RNA encoding the polypeptide of SEQ ID NO: 225 or a fragment thereof. In some embodiments, the self-replicating RNA molecule comprises an RNA corresponding to the polynucleotide of SEQ ID NO: 226 or a fragment thereof. In some embodiments, the self-replicating RNA molecule comprises an RNA corresponding to the polynucleotide of SEQ ID NO: 490 or a fragment thereof. In some embodiments, the self-replicating RNA molecule comprises an RNA corresponding to the polynucleotide of SEQ ID NO: 531 or a fragment thereof.

[0391] The disclosure also provides a self-replicating RNA molecule comprising an RNA encoding the polypeptide of SEQ ID NO: 227 or a fragment thereof. In some embodiments, the self-replicating RNA molecule comprises an RNA corresponding to the polynucleotide of SEQ ID NO: 228 or a fragment thereof.

[0392] The disclosure also provides a self-replicating RNA molecule comprising an RNA encoding the polypeptide of SEQ ID NO: 229 or a fragment thereof. In some embodiments, the self-replicating RNA molecule comprises an RNA corresponding to the polynucleotide of SEQ ID NO: 230 or a fragment thereof.

[0393] The disclosure also provides a self-replicating RNA molecule comprising an RNA encoding the polypeptide of SEQ ID NO: 231 or a fragment thereof. In some embodiments, the self-replicating RNA molecule comprises an RNA corresponding to the polynucleotide of SEQ ID NO: 232 or a fragment thereof.

[0394] The disclosure also provides a self-replicating RNA molecule comprising an RNA encoding the polypeptide of SEQ ID NO: 233 or a fragment thereof. In some embodiments, the self-replicating RNA molecule comprises an RNA corresponding to the polynucleotide of SEQ ID NO: 234 or a fragment thereof.

[0395] The disclosure also provides a self-replicating RNA molecule comprising an RNA encoding the polypeptide of SEQ ID NO: 235 or a fragment thereof. In some embodiments, the self-replicating RNA molecule comprises an RNA corresponding to the polynucleotide of SEQ ID NO: 236 or a fragment thereof. In some embodiments, the self-replicating RNA molecule comprises an RNA corresponding to the polynucleotide of SEQ ID NO: 493 or a fragment thereof. In some embodiments, the self-replicating RNA molecule comprises an RNA corresponding to the polynucleotide of SEQ ID NO: 534 or a fragment thereof.

[0396] The disclosure also provides a self-replicating RNA molecule comprising an RNA encoding the polypeptide of SEQ ID NO: 237 or a fragment thereof. In some embodiments, the self-replicating RNA molecule comprises an RNA corresponding to the polynucleotide of SEQ ID NO: 238 or a fragment thereof.

[0397] The disclosure also provides a self-replicating RNA molecule comprising an RNA encoding the polypeptide of SEQ ID NO: 239 or a fragment thereof. In some embodiments, the self-replicating RNA molecule comprises an RNA corresponding to the polynucleotide of SEQ ID NO: 240 or a fragment thereof.

[0398] The disclosure also provides a self-replicating RNA molecule comprising an RNA encoding the polypeptide of SEQ ID NO: 241 or a fragment thereof. In some embodiments, the self-replicating RNA molecule comprises an RNA corresponding to the polynucleotide of SEQ ID NO: 242 or a fragment thereof.

[0399] The disclosure also provides a self-replicating RNA molecule comprising an RNA encoding the polypeptide of SEQ ID NO: 243 or a fragment thereof. In some embodiments, the self-replicating RNA molecule comprises an RNA corresponding to the polynucleotide of SEQ ID NO: 244 or a fragment thereof.

[0400] The disclosure also provides a self-replicating RNA molecule comprising an RNA encoding the polypeptide of SEQ ID NO: 245 or a fragment thereof. In some embodiments, the self-replicating RNA molecule comprises an RNA corresponding to the polynucleotide of SEQ ID NO: 246 or a fragment thereof. In some embodiments, the self-replicating RNA molecule comprises an RNA corresponding to the polynucleotide of SEQ ID NO: 470 or a fragment thereof. In some embodiments, the self-replicating RNA molecule comprises an RNA corresponding to the polynucleotide of SEQ ID NO: 511 or a fragment thereof.

[0401] The disclosure also provides a self-replicating RNA molecule comprising an RNA encoding the polypeptide of SEQ ID NO: 247 or a fragment thereof. In some embodiments, the self-replicating RNA molecule comprises an RNA corresponding to the polynucleotide of SEQ ID NO: 248 or a fragment thereof.

[0402] The disclosure also provides a self-replicating RNA molecule comprising an RNA encoding the polypeptide of SEQ ID NO: 249 or a fragment thereof. In some embodiments, the self-replicating RNA molecule comprises an RNA corresponding to the polynucleotide of SEQ ID NO: 250 or a fragment thereof.

[0403] The disclosure also provides a self-replicating RNA molecule comprising an RNA encoding the polypeptide of SEQ ID NO: 251 or a fragment thereof. In some embodiments, the self-replicating RNA molecule comprises an RNA corresponding to the polynucleotide of SEQ ID NO: 252 or a fragment thereof. In some embodiments, the self-replicating RNA molecule comprises an RNA corresponding to the polynucleotide of SEQ ID NO: 469 or a fragment thereof. In some embodiments, the self-replicating RNA molecule comprises an RNA corresponding to the polynucleotide of SEQ ID NO: 510 or a fragment thereof.

[0404] The disclosure also provides a self-replicating RNA molecule comprising an RNA encoding the polypeptide of SEQ ID NO: 253 or a fragment thereof. In some embodiments, the self-replicating RNA molecule comprises an RNA corresponding to the polynucleotide of SEQ ID NO: 254 or a fragment thereof. In some embodiments, the self-replicating RNA molecule comprises an RNA corresponding to the polynucleotide of SEQ ID NO: 464 or a fragment thereof. In some embodiments, the self-replicating RNA molecule comprises an RNA corresponding to the polynucleotide of SEQ ID NO: 505 or a fragment thereof.

[0405] The disclosure also provides a self-replicating RNA molecule comprising an RNA encoding the polypeptide of SEQ ID NO: 255 or a fragment thereof. In some embodiments, the self-replicating RNA molecule comprises an RNA corresponding to the polynucleotide of SEQ ID NO: 256 or a fragment thereof. In some embodiments, the self-replicating RNA molecule comprises an RNA corresponding to the polynucleotide of SEQ ID NO: 474 or a fragment thereof. In some embodiments, the self-replicating RNA molecule comprises an RNA corresponding to the polynucleotide of SEQ ID NO: 515 or a fragment thereof.

[0406] The disclosure also provides a self-replicating RNA molecule comprising an RNA encoding the polypeptide of SEQ ID NO: 257 or a fragment thereof. In some embodiments, the self-replicating RNA molecule comprises an RNA corresponding to the polynucleotide of SEQ ID NO: 258 or a fragment thereof.

[0407] The disclosure also provides a self-replicating RNA molecule comprising an RNA encoding the polypeptide of SEQ ID NO: 259 or a fragment thereof. In some embodiments, the self-replicating RNA molecule comprises an RNA corresponding to the polynucleotide of SEQ ID NO: 260 or a fragment thereof.

[0408] The disclosure also provides a self-replicating RNA molecule comprising an RNA encoding the polypeptide of SEQ ID NO: 261 or a fragment thereof. In some embodiments, the self-replicating RNA molecule comprises an RNA corresponding to the polynucleotide of SEQ ID NO: 262 or a fragment thereof. In some embodiments, the self-replicating RNA molecule comprises an RNA corresponding to the polynucleotide of SEQ ID NO: 471 or a fragment thereof. In some embodiments, the self-replicating RNA molecule comprises an RNA corresponding to the polynucleotide of SEQ ID NO: 512 or a fragment thereof.

[0409] The disclosure also provides a self-replicating RNA molecule comprising an RNA encoding the polypeptide of SEQ ID NO: 263 or a fragment thereof. In some embodiments, the self-replicating RNA molecule comprises an RNA corresponding to the polynucleotide of SEQ ID NO: 264 or a fragment thereof.

[0410] The disclosure also provides a self-replicating RNA molecule comprising an RNA encoding the polypeptide of SEQ ID NO: 265 or a fragment thereof. In some embodiments, the self-replicating RNA molecule comprises an RNA corresponding to the polynucleotide of SEQ ID NO: 266 or a fragment thereof. In some embodiments, the self-replicating RNA molecule comprises an RNA corresponding to the polynucleotide of SEQ ID NO: 472 or a fragment thereof. In some embodiments, the self-replicating RNA molecule comprises an RNA corresponding to the polynucleotide of SEQ ID NO: 513 or a fragment thereof.

[0411] The disclosure also provides a self-replicating RNA molecule comprising an RNA encoding the polypeptide of SEQ ID NO: 267 or a fragment thereof. In some embodiments, the self-replicating RNA molecule comprises an RNA corresponding to the polynucleotide of SEQ ID NO: 268 or a fragment thereof.

[0412] The disclosure also provides a self-replicating RNA molecule comprising an RNA encoding the polypeptide of SEQ ID NO: 269 or a fragment thereof. In some embodiments, the self-replicating RNA molecule comprises an RNA corresponding to the polynucleotide of SEQ ID NO: 270 or a fragment thereof. In some embodiments, the self-replicating RNA molecule comprises an RNA corresponding to the polynucleotide of SEQ ID NO: 463 or a fragment thereof. In some embodiments, the self-replicating RNA molecule comprises an RNA corresponding to the polynucleotide of SEQ ID NO: 504 or a fragment thereof.

[0413] The disclosure also provides a self-replicating RNA molecule comprising an RNA encoding the polypeptide of SEQ ID NO: 271 or a fragment thereof. In some embodiments, the self-replicating RNA molecule comprises an RNA corresponding to the polynucleotide of SEQ ID NO: 272 or a fragment thereof. In some embodiments, the self-replicating RNA molecule comprises an RNA corresponding to the polynucleotide of SEQ ID NO: 465 or a fragment thereof. In some embodiments, the self-replicating RNA molecule comprises an RNA corresponding to the polynucleotide of SEQ ID NO: 508 or a fragment thereof.

[0414] The disclosure also provides a self-replicating RNA molecule comprising an RNA encoding the polypeptide of SEQ ID NO: 273 or a fragment thereof. In some embodiments, the self-replicating RNA molecule comprises an RNA corresponding to the polynucleotide of SEQ ID NO: 274 or a fragment thereof.

[0415] The disclosure also provides a self-replicating RNA molecule comprising an RNA encoding the polypeptide of SEQ ID NO: 275 or a fragment thereof. In some embodiments, the self-replicating RNA molecule comprises an RNA corresponding to the polynucleotide of SEQ ID NO: 276 or a fragment thereof. In some embodiments, the self-replicating RNA molecule comprises an RNA corresponding to the polynucleotide of SEQ ID NO: 459 or a fragment thereof. In some embodiments, the self-replicating RNA molecule comprises an RNA corresponding to the polynucleotide of SEQ ID NO: 500 or a fragment thereof.

[0416] The disclosure also provides a self-replicating RNA molecule comprising an RNA encoding the polypeptide of SEQ ID NO: 277 or a fragment thereof. In some embodiments, the self-replicating RNA molecule comprises an RNA corresponding to the polynucleotide of SEQ ID NO: 278 or a fragment thereof. In some embodiments, the self-replicating RNA molecule comprises an RNA corresponding to the polynucleotide of SEQ ID NO: 475 or a fragment thereof. In some embodiments, the self-replicating RNA molecule comprises an RNA corresponding to the polynucleotide of SEQ ID NO: 516 or a fragment thereof.

[0417] The disclosure also provides a self-replicating RNA molecule comprising an RNA encoding the polypeptide of SEQ ID NO: 279 or a fragment thereof. In some embodiments, the self-replicating RNA molecule comprises an RNA corresponding to the polynucleotide of SEQ ID NO: 280 or a fragment thereof.

[0418] The disclosure also provides a self-replicating RNA molecule comprising an RNA encoding the polypeptide of SEQ ID NO: 281 or a fragment thereof. In some embodiments, the self-replicating RNA molecule comprises an RNA corresponding to the polynucleotide of SEQ ID NO: 282 or a fragment thereof.

[0419] The disclosure also provides a self-replicating RNA molecule comprising an RNA encoding the polypeptide of SEQ ID NO: 283 or a fragment thereof. In some embodiments, the self-replicating RNA molecule comprises an RNA corresponding to the polynucleotide of SEQ ID NO: 284 or a fragment thereof.

[0420] The disclosure also provides a self-replicating RNA molecule comprising an RNA encoding the polypeptide of SEQ ID NO: 285 or a fragment thereof. In some embodiments, the self-replicating RNA molecule comprises an RNA corresponding to the polynucleotide of SEQ ID NO: 286 or a fragment thereof. In some embodiments, the self-replicating RNA molecule comprises an RNA corresponding to the polynucleotide of SEQ ID NO: 477 or a fragment thereof.

[0421] The disclosure also provides a self-replicating RNA molecule comprising an RNA encoding the polypeptide of SEQ ID NO: 287 or a fragment thereof. In some embodiments, the self-replicating RNA molecule comprises an RNA corresponding to the polynucleotide of SEQ ID NO: 288 or a fragment thereof.

[0422] The disclosure also provides a self-replicating RNA molecule comprising an RNA encoding the polypeptide of SEQ ID NO: 289 or a fragment thereof. In some embodiments, the self-replicating RNA molecule comprises an RNA corresponding to the polynucleotide of SEQ ID NO: 290 or a fragment thereof.

[0423] The disclosure also provides a self-replicating RNA molecule comprising an RNA encoding the polypeptide of SEQ ID NO: 291 or a fragment thereof. In some embodiments, the self-replicating RNA molecule comprises an RNA corresponding to the polynucleotide of SEQ ID NO: 292 or a fragment thereof.

[0424] The disclosure also provides a self-replicating RNA molecule comprising an RNA encoding the polypeptide of SEQ ID NO: 293 or a fragment thereof. In some embodiments, the self-replicating RNA molecule comprises an RNA corresponding to the polynucleotide of SEQ ID NO: 294 or a fragment thereof.

[0425] The disclosure also provides a self-replicating RNA molecule comprising an RNA encoding the polypeptide of SEQ ID NO: 295 or a fragment thereof. In some embodiments, the self-replicating RNA molecule comprises an RNA corresponding to the polynucleotide of SEQ ID NO: 296 or a fragment thereof.

[0426] The disclosure also provides a self-replicating RNA molecule comprising an RNA encoding the polypeptide of SEQ ID NO: 297 or a fragment thereof. In some embodiments, the self-replicating RNA molecule comprises an RNA corresponding to the polynucleotide of SEQ ID NO: 298 or a fragment thereof. In some embodiments, the self-replicating RNA molecule comprises an RNA corresponding to the polynucleotide of SEQ ID NO: 476 or a fragment thereof. In some embodiments, the self-replicating RNA molecule comprises an RNA corresponding to the polynucleotide of SEQ ID NO: 517 or a fragment thereof.

[0427] The disclosure also provides a self-replicating RNA molecule comprising an RNA encoding the polypeptide of SEQ ID NO: 299 or a fragment thereof. In some embodiments, the self-replicating RNA molecule comprises an RNA corresponding to the polynucleotide of SEQ ID NO: 300 or a fragment thereof.

[0428] The disclosure also provides a self-replicating RNA molecule comprising an RNA encoding the polypeptide of SEQ ID NO: 301 or a fragment thereof. In some embodiments, the self-replicating RNA molecule comprises an RNA corresponding to the polynucleotide of SEQ ID NO: 302 or a fragment thereof.

[0429] The disclosure also provides a self-replicating RNA molecule comprising an RNA encoding the polypeptide of SEQ ID NO: 303 or a fragment thereof. In some embodiments, the self-replicating RNA molecule comprises an RNA corresponding to the polynucleotide of SEQ ID NO: 304 or a fragment thereof.

[0430] The disclosure also provides a self-replicating RNA molecule comprising an RNA encoding the polypeptide of SEQ ID NO: 305 or a fragment thereof. In some embodiments, the self-replicating RNA molecule comprises an RNA corresponding to the polynucleotide of SEQ ID NO: 306 or a fragment thereof. In some embodiments, the self-replicating RNA molecule comprises an RNA corresponding to the polynucleotide of SEQ ID NO: 468 or a fragment thereof. In some embodiments, the self-replicating RNA molecule comprises an RNA corresponding to the polynucleotide of SEQ ID NO: 509 or a fragment thereof.

[0431] The disclosure also provides a self-replicating RNA molecule comprising an RNA encoding the polypeptide of SEQ ID NO: 307 or a fragment thereof. In some embodiments, the self-replicating RNA molecule comprises an RNA corresponding to the polynucleotide of SEQ ID NO: 308 or a fragment thereof.

[0432] The disclosure also provides a self-replicating RNA molecule comprising an RNA encoding the polypeptide of SEQ ID NO: 309 or a fragment thereof. In some embodiments, the self-replicating RNA molecule comprises an RNA corresponding to the polynucleotide of SEQ ID NO: 310 or a fragment thereof. In some embodiments, the self-replicating RNA molecule comprises an RNA corresponding to the polynucleotide of SEQ ID NO: 465 or a fragment thereof. In some embodiments, the self-replicating RNA molecule comprises an RNA corresponding to the polynucleotide of SEQ ID NO: 506 or a fragment thereof.

[0433] The disclosure also provides a self-replicating RNA molecule comprising an RNA encoding the polypeptide of SEQ ID NO: 311 or a fragment thereof. In some embodiments, the self-replicating RNA molecule comprises an RNA corresponding to the polynucleotide of SEQ ID NO: 312 or a fragment thereof.

[0434] The disclosure also provides a self-replicating RNA molecule comprising an RNA encoding the polypeptide of SEQ ID NO: 313 or a fragment thereof. In some embodiments, the self-replicating RNA molecule comprises an RNA corresponding to the polynucleotide of SEQ ID NO: 314 or a fragment thereof.

[0435] The disclosure also provides a self-replicating RNA molecule comprising an RNA encoding the polypeptide of SEQ ID NO: 315 or a fragment thereof. In some embodiments, the self-replicating RNA molecule comprises an RNA corresponding to the polynucleotide of SEQ ID NO: 316 or a fragment thereof.

[0436] The disclosure also provides a self-replicating RNA molecule comprising an RNA encoding the polypeptide of SEQ ID NO: 317 or a fragment thereof. In some embodiments, the self-replicating RNA molecule comprises an RNA corresponding to the polynucleotide of SEQ ID NO: 318 or a fragment thereof. In some embodiments, the self-replicating RNA molecule comprises an RNA corresponding to the polynucleotide of SEQ ID NO: 473 or a fragment thereof. In some embodiments, the self-replicating RNA molecule comprises an RNA corresponding to the polynucleotide of SEQ ID NO: 514 or a fragment thereof.

[0437] The disclosure also provides a self-replicating RNA molecule comprising an RNA encoding the polypeptide of SEQ ID NO: 319 or a fragment thereof. In some embodiments, the self-replicating RNA molecule comprises an RNA corresponding to the polynucleotide of SEQ ID NO: 320 or a fragment thereof.

[0438] The disclosure also provides a self-replicating RNA molecule comprising an RNA encoding the polypeptide of SEQ ID NO: 321 or a fragment thereof. In some embodiments, the self-replicating RNA molecule comprises an RNA corresponding to the polynucleotide of SEQ ID NO: 322 or a fragment thereof.

[0439] The disclosure also provides a self-replicating RNA molecule comprising an RNA encoding the polypeptide of SEQ ID NO: 323 or a fragment thereof. In some embodiments, the self-replicating RNA molecule comprises an RNA corresponding to the polynucleotide of SEQ ID NO: 324 or a fragment thereof.

[0440] The disclosure also provides a self-replicating RNA molecule comprising an RNA encoding the polypeptide of SEQ ID NO: 325 or a fragment thereof. In some embodiments, the self-replicating RNA molecule comprises an RNA corresponding to the polynucleotide of SEQ ID NO: 326 or a fragment thereof. In some embodiments, the self-replicating RNA molecule comprises an RNA corresponding to the polynucleotide of SEQ ID NO: 466 or a fragment thereof. In some embodiments, the self-replicating RNA molecule comprises an RNA corresponding to the polynucleotide of SEQ ID NO: 507 or a fragment thereof.

[0441] The disclosure also provides a self-replicating RNA molecule comprising an RNA encoding the polypeptide of SEQ ID NO: 327 or a fragment thereof. In some embodiments, the self-replicating RNA molecule comprises an RNA corresponding to the polynucleotide of SEQ ID NO: 328 or a fragment thereof.

[0442] The disclosure also provides a self-replicating RNA molecule comprising an RNA encoding the polypeptide of SEQ ID NO: 329 or a fragment thereof. In some embodiments, the self-replicating RNA molecule comprises an RNA corresponding to the polynucleotide of SEQ ID NO: 330 or a fragment thereof.

[0443] The disclosure also provides a self-replicating RNA molecule comprising an RNA encoding the polypeptide of SEQ ID NO: 331 or a fragment thereof. In some embodiments, the self-replicating RNA molecule comprises an RNA corresponding to the polynucleotide of SEQ ID NO: 332 or a fragment thereof.

[0444] The disclosure also provides a self-replicating RNA molecule comprising an RNA encoding the polypeptide of SEQ ID NO: 333 or a fragment thereof. In some embodiments, the self-replicating RNA molecule comprises an RNA corresponding to the polynucleotide of SEQ ID NO: 334 or a fragment thereof. In some embodiments, the self-replicating RNA molecule comprises an RNA corresponding to the polynucleotide of SEQ ID NO: 461 or a fragment thereof.

[0445] The disclosure also provides a self-replicating RNA molecule comprising an RNA encoding the polypeptide of SEQ ID NO: 335 or a fragment thereof. In some embodiments, the self-replicating RNA molecule comprises an RNA corresponding to the polynucleotide of SEQ ID NO: 336 or a fragment thereof.

[0446] The disclosure also provides a self-replicating RNA molecule comprising an RNA encoding the polypeptide of SEQ ID NO: 337 or a fragment thereof. In some embodiments, the self-replicating RNA molecule comprises an RNA corresponding to the polynucleotide of SEQ ID NO: 338 or a fragment thereof. In some embodiments, the self-replicating RNA molecule comprises an RNA corresponding to the polynucleotide of SEQ ID NO: 462 or a fragment thereof. In some embodiments, the self-replicating RNA molecule comprises an RNA corresponding to the polynucleotide of SEQ ID NO: 503 or a fragment thereof.

[0447] The disclosure also provides a self-replicating RNA molecule comprising an RNA encoding the polypeptide of SEQ ID NO: 339 or a fragment thereof. In some embodiments, the self-replicating RNA molecule comprises an RNA corresponding to the polynucleotide of SEQ ID NO: 340 or a fragment thereof.

[0448] The disclosure also provides a self-replicating RNA molecule comprising an RNA encoding the polypeptide of SEQ ID NO: 341 or a fragment thereof. In some embodiments, the self-replicating RNA molecule comprises an RNA corresponding to the polynucleotide of SEQ ID NO: 342 or a fragment thereof.

[0449] The disclosure also provides a self-replicating RNA molecule comprising an RNA encoding the polypeptide of SEQ ID NO: 343 or a fragment thereof. In some embodiments, the self-replicating RNA molecule comprises an RNA corresponding to the polynucleotide of SEQ ID NO: 344 or a fragment thereof. In some embodiments, the self-replicating RNA molecule comprises an RNA corresponding to SEQ ID NO: 483 or a fragment thereof. In some embodiments, the self-replicating RNA molecule comprises an RNA corresponding to the polynucleotide of SEQ ID NO: 524 or a fragment thereof.

[0450] The disclosure also provides a self-replicating RNA molecule comprising an RNA encoding the polypeptide of SEQ ID NO: 345 or a fragment thereof. In some embodiments, the self-replicating RNA molecule comprises an RNA corresponding to the polynucleotide of SEQ ID NO: 346 or a fragment thereof. In some embodiments, the self-replicating RNA molecule comprises an RNA corresponding to the polynucleotide of SEQ ID NO: 491 or a fragment thereof. In some embodiments, the self-replicating RNA molecule comprises an RNA corresponding to the polynucleotide of SEQ ID NO: 532 or a fragment thereof.

[0451] The disclosure also provides a self-replicating RNA molecule comprising an RNA encoding the polypeptide of SEQ ID NO: 347 or a fragment thereof. In some embodiments, the self-replicating RNA molecule comprises an RNA corresponding to the polynucleotide of SEQ ID NO: 348 or a fragment thereof.

[0452] The disclosure also provides a self-replicating RNA molecule comprising an RNA encoding the polypeptide of SEQ ID NO: 349 or a fragment thereof. In some embodiments, the self-replicating RNA molecule comprises an RNA corresponding to the polynucleotide of SEQ ID NO: 350 or a fragment thereof. In some embodiments, the self-replicating RNA molecule comprises an RNA corresponding to the polynucleotide of SEQ ID NO: 485 or a fragment thereof.

[0453] The disclosure also provides a self-replicating RNA molecule comprising an RNA encoding the polypeptide of SEQ ID NO: 351 or a fragment thereof. In some embodiments, the self-replicating RNA molecule comprises an RNA corresponding to the polynucleotide of SEQ ID NO: 352 or a fragment thereof.

[0454] The disclosure also provides a self-replicating RNA molecule comprising an RNA encoding the polypeptide of SEQ ID NO: 353 or a fragment thereof. In some embodiments, the self-replicating RNA molecule comprises an RNA corresponding to the polynucleotide of SEQ ID NO: 354 or a fragment thereof. In some embodiments, the self-replicating RNA molecule comprises an RNA corresponding to the polynucleotide of SEQ ID NO: 492 or a fragment thereof. In some embodiments, the self-replicating RNA molecule comprises an RNA corresponding to the polynucleotide of SEQ ID NO: 533 or a fragment thereof.

[0455] The disclosure also provides a self-replicating RNA molecule comprising an RNA encoding the polypeptide of SEQ ID NO: 355 or a fragment thereof. In some embodiments, the self-replicating RNA molecule comprises an RNA corresponding to the polynucleotide of SEQ ID NO: 356 or a fragment thereof.

[0456] The disclosure also provides a self-replicating RNA molecule comprising an RNA encoding the polypeptide of SEQ ID NO: 357 or a fragment thereof. In some embodiments, the self-replicating RNA molecule comprises an RNA corresponding to the polynucleotide of SEQ ID NO: 358 or a fragment thereof.

[0457] The disclosure also provides a self-replicating RNA molecule comprising an RNA encoding the polypeptide of SEQ ID NO: 359 or a fragment thereof. In some embodiments, the self-replicating RNA molecule comprises an RNA corresponding to the polynucleotide of SEQ ID NO: 360 or a fragment thereof.

[0458] The disclosure also provides a self-replicating RNA molecule comprising an RNA encoding the polypeptide of SEQ ID NO: 361 or a fragment thereof. In some embodiments, the self-replicating RNA molecule comprises an RNA corresponding to the polynucleotide of SEQ ID NO: 362 or a fragment thereof.

[0459] The disclosure also provides a self-replicating RNA molecule comprising an RNA encoding the polypeptide of SEQ ID NO: 363 or a fragment thereof. In some embodiments, the self-replicating RNA molecule comprises an RNA corresponding to the polynucleotide of SEQ ID NO: 364 or a fragment thereof.

[0460] The disclosure also provides a self-replicating RNA molecule comprising an RNA encoding the polypeptide of SEQ ID NO: 365 or a fragment thereof. In some embodiments, the self-replicating RNA molecule comprises an RNA corresponding to the polynucleotide of SEQ ID NO: 366 or a fragment thereof.

[0461] The disclosure also provides a self-replicating RNA molecule comprising an RNA encoding the polypeptide of SEQ ID NO: 367 or a fragment thereof. In some embodiments, the self-replicating RNA molecule comprises an RNA corresponding to the polynucleotide of SEQ ID NO: 368 or a fragment thereof.

[0462] The disclosure also provides a self-replicating RNA molecule comprising an RNA encoding the polypeptide of SEQ ID NO: 369 or a fragment thereof. In some embodiments, the self-replicating RNA molecule comprises an RNA corresponding to the polynucleotide of SEQ ID NO: 370 or a fragment thereof.

[0463] The disclosure also provides a self-replicating RNA molecule comprising an RNA encoding the polypeptide of SEQ ID NO: 371 or a fragment thereof. In some embodiments, the self-replicating RNA molecule comprises an RNA corresponding to the polynucleotide of SEQ ID NO: 372 or a fragment thereof.

[0464] The disclosure also provides a self-replicating RNA molecule comprising an RNA encoding the polypeptide of SEQ ID NO: 373 or a fragment thereof. In some embodiments, the self-replicating RNA molecule comprises an RNA corresponding to the polynucleotide of SEQ ID NO: 374 or a fragment thereof.

[0465] The disclosure also provides a self-replicating RNA molecule comprising an RNA encoding the polypeptide of SEQ ID NO: 375 or a fragment thereof. In some embodiments, the self-replicating RNA molecule comprises an RNA corresponding to the polynucleotide of SEQ ID NO: 376 or a fragment thereof.

[0466] The disclosure also provides a self-replicating RNA molecule comprising an RNA encoding the polypeptide of SEQ ID NO: 379 or a fragment thereof. In some embodiments, the self-replicating RNA molecule comprises an RNA corresponding to the polynucleotide of SEQ ID NO: 380 or a fragment thereof. In some embodiments, the self-replicating RNA molecule comprises an RNA corresponding to the polynucleotide of SEQ ID NO: 482 or a fragment thereof. In some embodiments, the self-replicating RNA molecule comprises an RNA corresponding to the polynucleotide of SEQ ID NO: 523 or a fragment thereof.

[0467] The disclosure also provides a self-replicating RNA molecule comprising an RNA encoding the polypeptide of SEQ ID NO: 381 or a fragment thereof. In some embodiments, the self-replicating RNA molecule comprises an RNA corresponding to the polynucleotide of SEQ ID NO: 382 or a fragment thereof. In some embodiments, the self-replicating RNA molecule comprises an RNA corresponding to the polynucleotide of SEQ ID NO: 460 or a fragment thereof. In some embodiments, the self-replicating RNA molecule comprises an RNA corresponding to the polynucleotide of SEQ ID NO: 501 or a fragment thereof.

[0468] The disclosure also provides a self-replicating RNA molecule comprising an RNA encoding the polypeptide of SEQ ID NO: 383 or a fragment thereof. In some embodiments, the self-replicating RNA molecule comprises an RNA corresponding to the polynucleotide of SEQ ID NO: 384 or a fragment thereof.

[0469] The disclosure also provides a self-replicating RNA molecule comprising an RNA encoding the polypeptide of SEQ ID NO: 385 or a fragment thereof. In some embodiments, the self-replicating RNA molecule comprises an RNA corresponding to the polynucleotide of SEQ ID NO: 386 or a fragment thereof.

[0470] The disclosure also provides a self-replicating RNA molecule comprising an RNA encoding the polypeptide of SEQ ID NO: 387 or a fragment thereof.

[0471] The disclosure also provides a self-replicating RNA molecule comprising an RNA encoding the polypeptide of SEQ ID NO: 388 or a fragment thereof.

[0472] The disclosure also provides a self-replicating RNA molecule comprising an RNA encoding the polypeptide of SEQ ID NO: 389 or a fragment thereof.

[0473] The disclosure also provides a self-replicating RNA molecule comprising an RNA encoding the polypeptide of SEQ ID NO: 390 or a fragment thereof.

[0474] The disclosure also provides a self-replicating RNA molecule comprising an RNA encoding the polypeptide of SEQ ID NO: 391 or a fragment thereof.

[0475] The disclosure also provides a self-replicating RNA molecule comprising an RNA encoding the polypeptide of SEQ ID NO: 392 or a fragment thereof.

[0476] The disclosure also provides a self-replicating RNA molecule comprising an RNA encoding the polypeptide of SEQ ID NO: 393 or a fragment thereof.

[0477] The disclosure also provides a self-replicating RNA molecule comprising an RNA encoding the polypeptide of SEQ ID NO: 394 or a fragment thereof.

[0478] The disclosure also provides a self-replicating RNA molecule comprising an RNA encoding the polypeptide of SEQ ID NO: 395 or a fragment thereof.

[0479] The disclosure also provides a self-replicating RNA molecule comprising an RNA encoding the polypeptide of SEQ ID NO: 396 or a fragment thereof.

[0480] The disclosure also provides a self-replicating RNA molecule comprising an RNA encoding the polypeptide of SEQ ID NO: 397 or a fragment thereof.

[0481] The disclosure also provides a self-replicating RNA molecule comprising an RNA encoding the polypeptide of SEQ ID NO: 398 or a fragment thereof.

[0482] The disclosure also provides a self-replicating RNA molecule comprising an RNA encoding the polypeptide of SEQ ID NO: 399 or a fragment thereof.

[0483] The disclosure also provides a self-replicating RNA molecule comprising an RNA encoding the polypeptide of SEQ ID NO: 400 or a fragment thereof.

[0484] The disclosure also provides a self-replicating RNA molecule comprising an RNA encoding the polypeptide of SEQ ID NO: 401 or a fragment thereof.

[0485] The disclosure also provides a self-replicating RNA molecule comprising an RNA encoding the polypeptide of SEQ ID NO: 402 or a fragment thereof.

[0486] The disclosure also provides a self-replicating RNA molecule comprising an RNA encoding the polypeptide of SEQ ID NO: 403 or a fragment thereof.

[0487] The disclosure also provides a self-replicating RNA molecule comprising an RNA encoding the polypeptide of SEQ ID NO: 404 or a fragment thereof.

[0488] The disclosure also provides a self-replicating RNA molecule comprising an RNA encoding the polypeptide of SEQ ID NO: 405 or a fragment thereof.

[0489] The disclosure also provides a self-replicating RNA molecule comprising an RNA encoding the polypeptide of SEQ ID NO: 406 or a fragment thereof.

[0490] The disclosure also provides a self-replicating RNA molecule comprising an RNA encoding the polypeptide of SEQ ID NO: 407 or a fragment thereof.

[0491] The disclosure also provides a self-replicating RNA molecule comprising an RNA encoding the polypeptide of SEQ ID NO: 408 or a fragment thereof.

[0492] The disclosure also provides a self-replicating RNA molecule comprising an RNA encoding the polypeptide of SEQ ID NO: 426 or a fragment thereof.

[0493] The disclosure also provides a self-replicating RNA molecule comprising an RNA encoding the polypeptide of SEQ ID NO: 427 or a fragment thereof.

[0494] The disclosure also provides a self-replicating RNA molecule comprising an RNA encoding the polypeptide of SEQ ID NO: 428 or a fragment thereof.

[0495] The disclosure also provides a self-replicating RNA molecule comprising an RNA encoding the polypeptide of SEQ ID NO: 429 or a fragment thereof.

[0496] The disclosure also provides a self-replicating RNA molecule comprising an RNA encoding the polypeptide of SEQ ID NO: 430 or a fragment thereof.

[0497] The disclosure also provides a self-replicating RNA molecule comprising an RNA encoding the polypeptide of SEQ ID NO: 431 or a fragment thereof.

[0498] The disclosure also provides a self-replicating RNA molecule comprising an RNA encoding the polypeptide of SEQ ID NO: 432 or a fragment thereof.

[0499] The disclosure also provides a self-replicating RNA molecule comprising an RNA encoding the polypeptide of SEQ ID NO: 433 or a fragment thereof.

[0500] The disclosure also provides a self-replicating RNA molecule comprising an RNA encoding the polypeptide of SEQ ID NO: 434 or a fragment thereof.

[0501] The disclosure also provides a self-replicating RNA molecule comprising an RNA encoding the polypeptide of SEQ ID NO: 435 or a fragment thereof.

[0502] The disclosure also provides a self-replicating RNA molecule comprising an RNA encoding the polypeptide of SEQ ID NO: 436 or a fragment thereof.

[0503] The disclosure also provides a self-replicating RNA molecule comprising an RNA encoding the polypeptide of SEQ ID NO: 437 or a fragment thereof. In some embodiments, the self-replicating RNA molecule comprises an RNA corresponding to the polynucleotide of SEQ ID NO: 448 or a fragment thereof. In some embodiments, the self-replicating RNA molecule comprises an RNA corresponding to the polynucleotide of SEQ ID NO: 478 or a fragment thereof. In some embodiments, the self-replicating RNA molecule comprises an RNA corresponding to the polynucleotide of SEQ ID NO: 519 or a fragment thereof.

[0504] The disclosure also provides a self-replicating RNA molecule comprising an RNA encoding the polypeptide of SEQ ID NO: 438 or a fragment thereof. In some embodiments, the self-replicating RNA molecule comprises an RNA corresponding to the polynucleotide of SEQ ID NO: 449 or a fragment thereof.

[0505] The disclosure also provides a self-replicating RNA molecule comprising an RNA encoding the polypeptide of SEQ ID NO: 439 or a fragment thereof. In some embodiments, the self-replicating RNA molecule comprises an RNA corresponding to the polynucleotide of SEQ ID NO: 450 or a fragment thereof. In some embodiments, the self-replicating RNA molecule comprises an RNA corresponding to the polynucleotide of SEQ ID NO: 479 or a fragment thereof. In some embodiments, the self-replicating RNA molecule comprises an RNA corresponding to the polynucleotide of SEQ ID NO: 520 or a fragment thereof.

[0506] The disclosure also provides a self-replicating RNA molecule comprising an RNA encoding the polypeptide of SEQ ID NO: 440 or a fragment thereof. In some embodiments, the self-replicating RNA molecule comprises an RNA corresponding to the polynucleotide of SEQ ID NO: 451 or a fragment thereof.

[0507] The disclosure also provides a self-replicating RNA molecule comprising an RNA encoding the polypeptide of SEQ ID NO: 441 or a fragment thereof. In some embodiments, the self-replicating RNA molecule comprises an RNA corresponding to the polynucleotide of SEQ ID NO: 452 or a fragment thereof.

[0508] The disclosure also provides a self-replicating RNA molecule comprising an RNA encoding the polypeptide of SEQ ID NO: 442 or a fragment thereof. In some embodiments, the self-replicating RNA molecule comprises an RNA corresponding to the polynucleotide of SEQ ID NO: 453 or a fragment thereof. In some embodiments, the self-replicating RNA molecule comprises an RNA corresponding to the polynucleotide of SEQ ID NO: 480 or a fragment thereof. In some embodiments, the self-replicating RNA molecule comprises an RNA corresponding to the polynucleotide of SEQ ID NO: 521 or a fragment thereof.

[0509] The disclosure also provides a self-replicating RNA molecule comprising an RNA encoding the polypeptide of SEQ ID NO: 443 or a fragment thereof. In some embodiments, the self-replicating RNA molecule comprises an RNA corresponding to the polynucleotide of SEQ ID NO: 454 or a fragment thereof.

[0510] The disclosure also provides a self-replicating RNA molecule comprising an RNA encoding the polypeptide of SEQ ID NO: 444 or a fragment thereof. In some embodiments, the self-replicating RNA molecule comprises an RNA corresponding to the polynucleotide of SEQ ID NO: 455 or a fragment thereof. In some embodiments, the self-replicating RNA molecule comprises an RNA corresponding to the polynucleotide of SEQ ID NO: 481 or a fragment thereof. In some embodiments, the self-replicating RNA molecule comprises an RNA corresponding to the polynucleotide of SEQ ID NO: 522 or a fragment thereof.

[0511] The disclosure also provides a self-replicating RNA molecule comprising an RNA encoding the polypeptide of SEQ ID NO: 445 or a fragment thereof. In some embodiments, the self-replicating RNA molecule comprises an RNA corresponding to the polynucleotide of SEQ ID NO: 456 or a fragment thereof.

[0512] The disclosure also provides a self-replicating RNA molecule comprising an RNA encoding the polypeptide of SEQ ID NO: 446 or a fragment thereof. In some embodiments, the self-replicating RNA molecule comprises an RNA corresponding to the polynucleotide of SEQ ID NO: 457 or a fragment thereof.

[0513] The disclosure also provides a self-replicating RNA molecule comprising an RNA encoding the polypeptide of SEQ ID NO: 447 or a fragment thereof. In some embodiments, the self-replicating RNA molecule comprises an RNA corresponding to the polynucleotide of SEQ ID NO: 458 or a fragment thereof.

[0514] The disclosure also provides a self-replicating RNA molecule comprising an RNA encoding the polypeptide of SEQ ID NO: 1001 or a fragment thereof. In some embodiments, the self-replicating RNA molecule comprises an RNA corresponding to the polynucleotide of SEQ ID NO: 1000 or a fragment thereof.

[0515] The disclosure also provides a self-replicating RNA molecule comprising an RNA encoding the polypeptide of SEQ ID NO: 1003 or a fragment thereof. In some embodiments, the self-replicating RNA molecule comprises an RNA corresponding to the polynucleotide of SEQ ID NO: 1002 or a fragment thereof.

[0516] In some embodiments, the polynucleotide is an in-frame polynucleotide.

[0517] The self-replicating RNA molecules can comprise fragments of about 6-24 amino acids in length. In some embodiments, the self-replicating RNA molecule can comprise fragments comprising at least 6 amino acids. In some embodiments, the fragments comprise at least 7 amino acids. In some embodiments, the fragments comprise at least 8 amino acids. In some embodiments, the fragments comprise at least 9 amino acids. In some embodiments, the fragments comprise at least 10 amino acids. In some embodiments, the fragments comprise at least 11 amino acids. In some embodiments, the fragments comprise at least 12 amino acids. In some embodiments, the fragments comprise at least 13 amino acids. In some embodiments, the fragments comprise at least 14 amino acids. In some embodiments, the fragments comprise at least 15 amino acids. In some embodiments, the fragments comprise at least 16 amino acids. In some embodiments, the fragments comprise at least 17 amino acids. In some embodiments, the fragments comprise at least 18 amino acids. In some embodiments, the fragments comprise at least 19 amino acids. In some embodiments, the fragments comprise at least 20 amino acids. In some embodiments, the fragments comprise at least 21 amino acids. In some embodiments, the fragments comprise at least 22 amino acids. In some embodiments, the fragments comprise at least 23 amino acids. In some embodiments, the fragments comprise at least 24 amino acids. In some embodiments, the fragments comprise at least 25 amino acids. In some embodiments, the fragments comprise about 6 amino acids. In some embodiments, the fragments comprise about 7 amino acids. In some embodiments, the fragments comprise about 8 amino acids. In some embodiments, the fragments comprise about 9 amino acids. In some embodiments, the fragments comprise about 10 amino acids. In some embodiments, the fragments comprise about 11 amino acids. In some embodiments, the fragments comprise about 12 amino acids. In some embodiments, the fragments comprise about 13 amino acids. In some embodiments, the fragments comprise about 14 amino acids. In some embodiments, the fragments comprise about 15 amino acids. In some embodiments, the fragments comprise about 16 amino acids. In some embodiments, the fragments comprise about 17 amino acids. In some embodiments, the fragments comprise about 18 amino acids. In some embodiments, the fragments comprise about 19 amino acids. In some embodiments, the fragments comprise about 20 amino acids. In some embodiments, the fragments comprise about 21 amino acids. In some embodiments, the fragments comprise about 22 amino acids. In some embodiments, the fragments comprise about 23 amino acids. In some embodiments, the fragments comprise about 24 amino acids. In some embodiments, the fragments comprise about 25 amino acids. In some embodiments, the fragments comprise about 6-25 amino acids. In some embodiments, the fragments comprise about 7-25 amino acids. In some embodiments, the fragments comprise about 8-25 amino acids. In some embodiments, the fragments comprise about 8-24 amino acids. In some embodiments, the fragments comprise about 8-23 amino acids. In some embodiments, the fragments comprise about 8-22 amino acids. In some embodiments, the fragments comprise about 8-21 amino acids. In some embodiments, the fragments comprise about 8-20 amino acids. In some embodiments, the fragments comprise about 8-19 amino acids. In some embodiments, the fragments comprise about 8-18 amino acids. In some embodiments, the fragments comprise about 8-17 amino acids. In some embodiments, the fragments comprise about 8-16 amino acids. In some embodiments, the fragments comprise about 8-15 amino acids. In some embodiments, the fragments comprise about 8-14 amino acids. In some embodiments, the fragments comprise about 9-14 amino acids. In some embodiments, the fragments comprise about 9-13 amino acids. In some embodiments, the fragments comprise about 9-12 amino acids. In some embodiments, the fragments comprise about 9-11 amino acids. In some embodiments, the fragments comprise about 9-10 amino acids.

[0518] In some embodiments, the self-replicating RNA molecule comprises RNA corresponding to fragments comprising SEQ ID NOs: 387, 388, 389, 390, 391, 392, 393, 394, 395, 396, 397, 398, 399, 400, 401, 402, 403, 404, 405, 406, 407, 408, 560, 561, 562, 563, 564, 565, 566, 567, 568, 569, 570, 571, 572, 573, 574, 575, 576, 577, 578, 579, 580, 581, 582, 583, 584, 585, 586, 587, 588, 589, 590, 591, 592, 593, 594, 595, 596, 597, 598, 599, 600, 601, 602, 603, 604, 605, 606, 607, 608, 609, 610, 611, 612, 613, 614, 615, 616, 617, 618, 619, 620, or 621.

[0519] In some embodiments, the self-replicating RNA molecule comprises RNA corresponding to fragments comprising SEQ ID NOs: 377, 378, 415, 417, 418, 420, 502, 518, 526, 527, 714, 715, 716, 717, 718, 719, 720, 721, 722, 723, 724, 725, 726, 727, 728, 729, 730, 731, 732, 733, 734, 735, 736, 737, 738, 739, 740, 741, 742, 743, 744, 745, 746, 747, 748, 749, 750, 751, 752, 753, 74, 755, 756, 757, 758, 759, 760, 761, 762, 763, 764, 765, 766, 767, 768, 769, 770, 771, 772, 773, 774, 775, 776, 777, 778, 779, 780, 781, 782, 783, 784, 785, 786, 787, 788, 789, 790, 791, 792, 793, 794, 795, 796, 797, 798, 799, 800, 801, 802, 803, 804, 805, 806, 807, 808, 809, 810, 811, 812, 813, 814, 815, 816, 817, 818, 819, 820, 821, 822, 823, 824, 825, 826, 827, 828, 829, 830, 831, 832, 833, 834, 835, 836, 837, 838, 839, 840, 841, 842, 843, 844, 845, 846, 487, 848, 849, 850, 851, 852, 853, 854, 855, 856, 857, 858, 859, 860, 861, 862, 863, 864, 865, 866, 867, 868, 869, 870, 871, 872, 873, 874, 875, 876, 877, 878, 879, 880, 881, 882, 883, 884, 885, 886, 887, 888, 889, 890, 891, 892, 893, 894, 895, 896, 897, 898, 899, 900, 901, 902, 903, 904, 905, 906, 907, 908, 909, 910, 911, 912, 913, 914, 915, 916, 917, 918, 919, 920, 921, 922, 923, 924, 925, 926, 927, 928, 929, 930, 931, 932, 933, 934, 935, 936, 937, 938, 939, 940, 941, 942, 943, 944, 945, 946, 947, 948, 949, 950, 951, 952, 953, 954, 955, 956, 957, 958, 959, 960, 961, 962, 963, 964, 965, 966, 967, 968, 969, 970, 971, 972, 973, 974, 975, 976, 977, 978, 979, 980, or 548.

[0520] The self-replicating RNA molecule can comprise fragments that are immunogenic fragments Immunogenic fragments in general are peptides that activate T cells, for example those that induce cytotoxic T cells when presented on MHC. Methods for assessing activation of T cells and/or induction of cytotoxic T lymphocytes are well known. In an exemplary assay, PBMCs isolated from a prostate cancer patient are cultured in vitro in the presence of a test neoantigen or fragments thereof and IL-25. The cultures may be replenished periodically with IL-15 and IL-2 and cultured for an additional 12 days. On day 12, the cultures are re-stimulated with the test neoantigen or fragments thereof and the following day T cell activation may be assessed by measuring a percentage of IFNγ⁺TNFα⁺CD8⁺ cells when compared to a control culture.

[0521] In some embodiments, the fragments are about 6-25 amino acids in length, such as about 8-25 amino acids in length.

[0522] Any of the disclosed self-replicating RNA molecules can comprise one or more of the following:

[0523] one or more nonstructural genes nsP1, nsP2, nsP3, and nsP4;

[0524] at least one of a DLP motif, a 5′ UTR, a 3′UTR, and a Poly A; and

[0525] a subgenomic promoter.

[0526] In some embodiments, for example, the self-replicating RNA molecule can comprise:

[0527] One or more of the following:

[0528] one or more nonstructural genes nsP1, nsP2, nsP3, and nsP4;

[0529] at least one of a DLP motif, a 5′ UTR, a 3′UTR, and a Poly A; and

[0530] a subgenomic promoter;

[0531] and a RNA encoding one or more polypeptides selected from the group consisting of SEQ ID NOs: 275, 381, 333, 337, 269, 253, 309, 325, 271, 305, 251, 245, 261, 265, 317, 255, 277, 297, 285, 437, 439, 442, 444, 379, 343, 211, 349, 213, 215, 221, 219, 225, 345, 353, 235, 223, 167, 171, 19, 23, 177, 1001, and 1003 and fragments thereof; operably linked to the subgenomic promoter.

[0532] In some embodiments, the self-replicating RNA molecule can comprise: One or more of the following:

[0533] one or more nonstructural genes nsP1, nsP2, nsP3, and nsP4;

[0534] at least one of a DLP motif, 5′ UTR, a 3′UTR, and a Poly A; and

[0535] a subgenomic promoter;

[0536] and a RNA encoding one or more polypeptides selected from the group consisting of SEQ ID NOs: 541, 543, 550, 552, 554, 555, 556, 557, 558, 559, 623, 624, 625, 626, 1004, or 1005, and fragments thereof; operably linked to the subgenomic promoter.

[0537] In some embodiments, the self-replicating RNA molecule comprises an RNA sub-sequence encoding a protein or peptide; 5′ and 3′ alphavirus untranslated regions; RNA sub-sequences encoding amino acid sequences derived from New World alphavirus VEEV nonstructural proteins nsP1, nsP2, nsP3, and nsP4; a sub-genomic promoter that is operably linked to and regulates translation of the RNA sequence encoding the protein; a 5′ cap and a 3′ poly-A tail; positive sense, single-stranded RNA; a DLP from Sindbis virus upstream of the non-structural protein 1 (nsP1); a 2A ribosome skipping element; and a nsp1 nucleotide repeat downstream of the 5′-UTR and upstream of the DLP.

[0538] Any of the disclosed self-replicating RNA molecules can further include a coding sequence for an autoprotease peptide (e.g., autocatalytic self-cleaving peptide), where the coding sequence for the autoprotease is optionally operably linked upstream to the second nucleic acid sequence.

[0539] Generally, any proteolytic cleavage site known in the art can be incorporated into the disclosed nucleic acid molecules and can be, for example, proteolytic cleavage sequences that are cleaved post-production by a protease. Further suitable proteolytic cleavage sites also include proteolytic cleavage sequences that can be cleaved following addition of an external protease. As used herein the term “autoprotease” refers to a “self-cleaving” peptide that possesses autoproteolytic activity and is capable of cleaving itself from a larger polypeptide moiety. First identified in the foot-and-mouth disease virus (FMDV), a member of the picornavirus group, several autoproteases have been subsequently identified such as, for example, “2A like” peptides from equine rhinitis A virus (E2A), porcine teschovirus-1 (P2A) and Thosea asigna virus (T2A), and their activities in proteolytic cleavage have been shown in various ex vitro and in vivo eukaryotic systems. As such, the concept of autoproteases is available to one of skill in the art as many naturally-occurring autoprotease systems have been identified. Well studied autoprotease systems are e.g. viral proteases, developmental proteins (e.g. HetR, Hedgehog proteins), RumA autoprotease domain, UmuD, etc. Non-limiting examples of autoprotease peptides suitable for the compositions and methods include the peptide sequences from porcine teschovirus-1 2A (P2A), a foot-and-mouth disease virus (FMDV) 2A (F2A), an Equine Rhinitis A Virus (ERAV) 2A (E2A), a Thosea asigna virus 2A (T2A), a cytoplasmic polyhedrosis virus 2A (BmCPV2A), a Flacherie Virus 2A (BmIFV2A), or a combination thereof.

[0540] In some embodiments, the coding sequence for the autoprotease peptide is operably linked downstream of the DLP motif and upstream to the first and second polynucleotides.

[0541] In some embodiments, the autoprotease peptide comprises, or consists of, a peptide sequence selected from the group consisting of porcine teschovirus-1 2A (P2A), a foot-and-mouth disease virus (FMDV) 2A (F2A), an Equine Rhinitis A Virus (ERAV) 2A (E2A), a Thosea asigna virus 2A (T2A), a cytoplasmic polyhedrosis virus 2A (BmCPV2A), a Flacherie Virus 2A (BmIFV2A), and a combination thereof. In some embodiments, the autoprotease peptide includes a peptide sequence of porcine teschovirus-1 2A (P2A).

[0542] In some embodiments, the autoprotease peptide is selected from the group consisting of porcine teschovirus-1 2A (P2A), foot-and-mouth disease virus (FMDV) 2A (F2A). Equine Rhinitis A Virus (ERAV) 2A (E2A). Thosea asigna virus 2A (T2A), cytoplasmic polyhedrosis virus 2A (BmCPV2A), Flacherie Virus 2A (BmIFV2A), and a combination thereof. In some embodiments, the autoprotease peptide is porcine teschovirus-1 2A (P2A). The incorporation of the P2A peptide in the modified viral RNA replicons allows release of GOI protein (e.g. prostate neoantigens) from the capsid-GOI fusion.

[0543] In some embodiments, the porcine teschovirus-1 2A (P2A) peptide sequence is engineered in-frame immediately after the DLP sequence and in-frame immediately upstream of all GOI.

[0544] Any of the disclosed self-replicating RNA molecules can further include a coding sequence downstream Loop (DLP) motif. Some viruses have sequences capable of forming one or more stem-loop structures which regulate, for example increase, capsid gene expression. Viral capsid enhancer as used herein refers to a regulatory element comprising sequences capable of forming such stem-loop structures. In some examples, the stem-loop structures are formed by sequences within the coding sequence of a capsid protein and named Downstream Loop (DLP) sequence. As disclosed herein, these stem-loop structures or variants thereof can be used to regulate, for example increase, expression level of genes of interest. For example, these stem-loop structures or variants thereof can be used in a recombinant vector (e.g., in a heterologous viral genome) for enhancing transcription and/or translation of coding sequence operably linked downstream thereto.

[0545] Alphavirus replication in host cells is known to induce the double-stranded RNA-dependent protein kinase (PKR). PKR phosphorylates the eukaryotic translation initiation factor 2α (eIF2α). Phosphorylation of eIF2α blocks translation initiation of mRNA and in doing so keeps viruses from a completing a productive replication cycle. Infection of cells with Sindbis virus induces PKR that results in phosphorylation of eIF2α, yet the viral subgenomic mRNA is efficiently translated while translation of all other cellular mRNAs is restricted. The efficient translation of the viral subgenomic mRNA in Sindbis virus is made possible by the presence of a prominent RNA structure, a stable RNA hairpin loop located downstream of the wild type AUG initiator codon for the virus capsid protein (e.g., capsid enhancer). This hairpin loop, also called stem-loop, RNA structure is often referred to as the Downstream Loop structure (or DLP motif). It has been reported that the DLP structure can stall a ribosome on the wild type AUG and this supports translation of the subgenomic mRNA without the requirement for functional eIF2α. Thus, subgenomic mRNAs of Sindbis virus (SINV) as well as of other alphaviruses are efficiently translated even in cells that have highly active PKR resulting in complete phosphorylation of eIF2α.

[0546] The DLP structure was first characterized in Sindbis virus (SINV) 26S mRNA and also detected in Semliki Forest virus (SFV). Similar DLP structures have been reported to be present in at least 14 other members of the Alphavirus genus including New World (for example, MAYV, UNAV, EEEV (NA), EEEV (SA), AURAV) and Old World (SV, SFV, BEBV, RRV, SAG, GETV, MIDV, CHIKV, and ONNV) members. The predicted structures of these Alphavirus 26S mRNAs were constructed based on SHAPE (selective 2′-hydroxyl acylation and primer extension) data (Toribio et al., Nucleic Acids Res. May 19; 44(9):4368-80, 2016; the content of which is hereby incorporated by reference). Stable stem-loop structures were detected in all cases except for CHIKV and ONNV, whereas MAYV and EEEV showed DLPs of lower stability (Toribio et al., 2016 supra). The highest DLP activities were reported for those Alphaviruses that contained the most stable DLP structures.

[0547] As an example, members of the Alphavirus genus can resist the activation of antiviral RNA-activated protein kinase (PKR) by means of the downstream loop (DLP) present within in viral 26S transcripts, which allows an eIF2-independent translation initiation of these mRNAs. The downstream loop (DLP), is located downstream from the AUG in SINV 26S mRNA and in other members of the Alphavirus genus.

[0548] In some embodiments, the self-replicating RNA molecules can include a coding sequence for a gene of interest (GOI) operably linked to DLP motif(s) and/or the coding sequence for the DLP motifs. In some embodiments, the self-replicating RNA molecule comprises a downstream loop (DLP). In some embodiments, the downstream loop (DLP) comprises at least one RNA-stem-loop.

[0549] In some instances, DLP activity depends on the distance between the DLP motif and the initiation codon AUG (AUGi). The AUG-DLP spacing in Alphavirus 26S mRNAs is tuned to the topology of the ES6S region of the ribosomal 18S rRNA in a way that allows the placement of the AUGi in the P site of the 40S subunit stalled by the DLP, allowing the incorporation of Met-tRNA without the participation of eIF2. In the case of Sindbis virus, the DLP motif is found in the first ^{˜}150 nt of the Sindbis subgenomic RNA. The hairpin is located downstream of the Sindbis capsid AUG initiation codon (AUG at nt 50 of the Sindbis subgenomic RNA) and results in stalling a ribosome such that the correct capsid gene AUG is used to initiate translation. Previous studies of sequence comparisons and structural RNA analysis revealed the evolutionary conservation of DLP in SINV and predicted the existence of equivalent DLP structures in many members of the Alphavirus genus (see e.g., Ventoso, J. Virol. 9484-9494, Vol. 86, September 2012).

[0550] Without being bound by any particular theory, it is believed that placing the DLP motif upstream of a coding sequence for any GOI typically results in a fusion-protein of N-terminal capsid amino acids that are encoded in the hairpin region to the GOI encoded protein because initiation occurs on the capsid AUG not the GOI AUG.

[0551] In some embodiments, the sell-replicating RNA molecule comprises a downstream loop placed upstream of the non-structural protein 1 (nsP1). In some embodiments, the downstream loop is placed upstream of the non-structural protein 1 (nsP1) and is joined to the nsP1 by a porcine teschovirus-1 2A (P2A) ribosome skipping element.

[0552] The DLP-containing self-replicating RNA molecule can be useful in conferring a resistance to the innate immune system in a subject. Unmodified RNA replicons are sensitive to the initial innate immune system state of cells they are introduced into. If the cells/individuals are in a highly active innate immune system state, the RNA replicon performance (e.g., replication and expression of a GOI) can be negatively impacted. By engineering a DLP to control initiation of protein translation, particularly of non-structural proteins, the impact of the pre-existing activation state of the innate immune system to influence efficient RNA replicon replication is removed or lessened. The result is more uniform and/or enhanced expression of a GOI that can impact vaccine efficacy or therapeutic impact of a treatment.

[0553] The DLP motif of the self-replicating RNA molecule can confer efficient mRNA translation in cellular environments where cellular mRNA translation is inhibited. When a DLP is linked with translation of a replicon vector's non-structural protein genes, the replicase and transcriptase proteins are capable of initiating functional replication in PKR activated cellular environments. When a DLP is linked with translation of subgenomic mRNAs, robust GOI expression is possible even when cellular mRNA is restricted due to innate immune activation. Accordingly, engineering self-replicating RNA that contain DLP structures to help drive translation of both non-structural protein genes and subgenomic mRNAs provides a powerful way to overcome innate immune activation.

[0554] Examples of a self-replicating RNA vector comprising a DLP motif are described in U.S. Patent Application Publication US2018/0171340 and the International Patent Application Publication WO2018/106615, the content of which is incorporated herein by reference in its entirety.

[0555] Any of the disclosed self-replicating RNA molecules can further comprise nonstructural genes nsP1, nsP2, nsP3, and/or nsP4. In some embodiments, the self-replicating RNA molecule does not encode a functional viral structural protein.

[0556] Alphavirus genomes encode non-structural proteins nsP1, nsP2, nsP3, and nsP4, which are produced as a single polyprotein precursor, sometimes designated P1234 (or nsP1-4 or nsP1234), and which is cleaved into the mature proteins through proteolytic processing (FIG. 9B). nsP1 can be about 60 kDa in size and may have methyltransferase activity and be involved in the viral capping reaction. nsP2 has a size of about 90 kDa and may have helicase and protease activity while nsP3 is about 60 kDa and contains three domains: a macrodomain, a central (or alphavirus unique) domain, and a hypervariable domain (HVD). nsP4 is about 70 kDa in size and contains the core RNA-dependent RNA polymerase (RdRp) catalytic domain. After infection the alphavirus genomic RNA is translated to yield a P1234 polyprotein, which is cleaved into the individual proteins.

[0557] Alphavirus genomes also encode three structural proteins: the core nucleocapsid protein C, and the envelope proteins P62 and E1 that associate as a heterodimer. Structural proteins are under the control of a subgenomic promoter and can be replaced by gene of interests (GIO).

[0558] In some embodiments, the self-replicating RNA molecule can lack (or not contain) the sequence(s) of at least one (or all) of the structural viral proteins (e.g. nucleocapsid protein C, and envelope proteins P62, 6K, and E1). In these embodiments, the sequences encoding one or more structural genes can be substituted with one or more sequences such as, for example, a coding sequence for at least one protein or peptide (or other gene of interest (GOI)) e.g. the disclosed prostate neoantigens.

[0559] In some embodiments, the self-replicating RNA molecules can lack sequences encoding alphavirus structural proteins; or do not encode alphavirus (or, optionally, any other) structural proteins. In some embodiments, the self-replicating RNA molecules are further devoid of a part or the entire coding region for one or more viral structural proteins. For example, the alphavirus expression system may be devoid of a portion of or the entire coding sequence for one or more of the viral capsid protein C, E1 glycoprotein, E2 glycoprotein, E3 protein, and 6K protein.

[0560] In some embodiments, the self-replicating RNA molecule does not contain coding sequences for at least one of the structural viral proteins. In these instances, the sequences encoding structural genes can be substituted with one or more sequences such as, for example, a coding sequence for a gene of interest (e.g., prostate neoantigens) FIG. 9.

[0561] The self-replicating RNA molecule can comprise nonstructural genes nsP1, nsP2, nsP3, and nsP4, and wherein the self-replicating RNA molecule does not encode a functional viral structural protein.

[0562] In some embodiments, the self-replicating RNA molecules can comprise the coding sequence for at least one, at least two, at least three, or at least four nonstructural viral proteins (e.g. nsP1, nsP2, nsP3, nsP4). The nsP1, nsP2, nsP3, and nsP4 proteins encoded by the replicon are functional or biologically active proteins.

[0563] In some embodiments, the self-replicating RNA molecule includes the coding sequence for a portion of the at least one nonstructural viral protein. For example, the self-replicating RNA molecules can include about 10%, 20%, 30%, 40%, 50%, 60%, 70%, 80%, 90%, 95%, 100%, or a range between any two of these values, of the encoding sequence for the at least one nonstructural viral protein. In some embodiments, the self-replicating RNA molecule can include the coding sequence for a substantial portion of the at least one nonstructural viral protein. As used herein, a “substantial portion” of a nucleic acid sequence encoding a nonstructural viral protein comprises enough of the nucleic acid sequence encoding the nonstructural viral protein to afford putative identification of that protein, either by manual evaluation of the sequence by one skilled in the art, or by computer-automated sequence comparison and identification using algorithms such as BLAST (see, for example, in “Basic Local Alignment Search Tool”; Altschul S F et al., J. Mol. Biol. 215:403-410, 1993).

[0564] In some embodiments, the self-replicating RNA molecule can include the entire coding sequence for the at least one nonstructural protein. In some embodiments, the self-replicating RNA molecule comprises substantially all the coding sequence for the native viral nonstructural proteins. In certain embodiments, the one or more nonstructural viral proteins are derived from the same virus.

[0565] The self-replicating RNA molecules can be an alphavirus-derived RNA replicon. In some embodiments, the alphavirus derived self-replicating RNA molecule of the disclosure is of an alphavirus belonging to the VEEV/EEEV group, or the SF group, or the SIN group. Non-limiting examples of SF group alphaviruses include Semliki Forest virus, O'Nyong-Nyong virus, Ross River virus, Middelburg virus, Chikungunya virus, Barmah Forest virus, Getah virus, Mayaro virus, Sagiyama virus, Bebaru virus, and Una virus. Non-limiting examples of SIN group alphaviruses include Sindbis virus, Girdwood S. A. virus, South African Arbovirus No. 86, Ockelbo virus, Aura virus, Babanki virus, Whataroa virus, and Kyzylagach virus. Non-limiting examples of VEEV/EEEV group alphaviruses include Eastern equine encephalitis virus (EEEV), Venezuelan equine encephalitis virus (VEEV), Everglades virus (EVEV), Mucambo virus (MUCV), Pixuna virus (PIXV), Middleburg virus (MIDV), Chikungunya virus (CHIKV), O'Nyong-Nyong virus (ONNV), Ross River virus (RRV), Barmah Forest virus (BF), Getah virus (GET), Sagiyama virus (SAGV), Bebaru virus (BEBV), Mayaro virus (MAYV), and Una virus (UNAV).

[0566] In some embodiments, the alphavirus-derived self-replicating RNA molecule is a Eastern equine encephalitis virus (EEEV), Venezuelan equine encephalitis virus (VEEV), Everglades virus (EVEV), Mucambo virus (MUCV), Semliki forest virus (SFV), Pixuna virus (PIXV), Middleburg virus (MIDV), Chikungunya virus (CHIKV), O'Nyong-Nyong virus (ONNV), Ross River virus (RRV), Barmah Forest virus (BF), Getah virus (GET), Sagiyama virus (SAGV), Bebaru virus (BEBV), Mayaro virus (MAYV), Una virus (UNAV), Sindbis virus (SINV), Aura virus (AURAV), Whataroa virus (WHAV), Babanki virus (BABV), Kyzylagach virus (KYZV), Western equine encephalitis virus (WEEV), Highland J virus (HJV), Fort Morgan virus (FMV), Ndumu (NDUV), and Buggy Creek virus. Virulent and avirulent alphavirus strains are both suitable. In some embodiments, the alphavirus RNA replicon is of a Sindbis virus (SIN), a Semliki Forest virus (SFV), a Ross River virus (RRV), a Venezuelan equine encephalitis virus (VEEV), or an Eastern equine encephalitis virus (EEEV).

[0567] The self-replicating RNA molecules can be derived from alphavirus genomes, meaning that they have some of the structural characteristics of alphavirus genomes, or be similar to them. The self-replicating RNA molecules can be derived from modified alphavirus genomes.

[0568] The self-replicating RNA molecules can contain RNA sequences from (or amino acid sequences encoded by) a wild-type New World or Old World alphavirus genome. Any of the self-replicating RNA molecules disclosed herein can contain RNA sequences “derived from” or “based on” wild type alphavirus genome sequences, meaning that they have at least 60% or at least 65% or at least 68% or at least 70% or at least 80% or at least 85% or at least 90% or at least 95% or at least 97% or at least 98% or at least 99% or 100% or 80-99% or 90-100% or 95-99% or 95-100% or 97-99% or 98-99% sequence identity with an RNA sequence (which can be a corresponding RNA sequence) from a wild type RNA alphavirus genome, which can be a New World or Old World alphavirus genome.

[0569] In some embodiments, the alphavirus-derived self-replicating RNA molecule is a Venezuelan equine encephalitis virus (VEEV).

[0570] In some embodiments, the downstream loop DLP of the self-replicating RNA molecule placed upstream of the non-structural protein 1 (nsP1) is derived from Sindbis virus.

[0571] In some embodiments the self-replicating RNA molecule comprises nsP1, nsP2, nsP3, and nsP4 sequences derived from the Venezuelan equine encephalitis virus (VEEV) and a DLP motif derived from the Sindbis virus (SIN).

[0572] The self-replicating RNA molecules can also have an RNA sub-sequence encoding an amino acid sequence derived from an alphavirus nsP3 macro domain, and an RNA sub-sequence encoding an amino acid sequence derived from an alphavirus nsP3 central domain. The self-replicating RNA molecules can also have an RNA sub-sequence encoding an amino acid sequence derived entirely from an Old World alphavirus nsP3 hypervariable domain, or can have an amino acid sequence having a portion derived from a New World alphavirus nsP3 hypervariable domain, and a portion derived from an Old World alphavirus nsP3 hypervariable domain. i.e. the hyper variable domain (HVD) can be a hybrid or chimeric New World/Old World sequence.

[0573] In some embodiments, the self-replicating RNA molecules can have an RNA sequence encoding amino acid sequences derived from a wild type New World alphavirus nsP1, nsP2, nsP3, and nsP4 protein sequences. In some embodiments, the one or more nonstructural proteins are derived from different viruses.

[0574] In some embodiments, the self-replicating RNA molecule may have an RNA sequence encoding an nsP3 macro domain derived from a wild type alphavirus nsP3, and an nsP3 central domain derived from a wild type alphavirus nsP3. The macro and central domain(s) can both be derived from a New World wild type alphavirus nsP3, or can both be derived from an Old World wild type alphavirus nsP3 protein. In other embodiments, the macro domain can be derived from a New World wild type alphavirus macro domain and the central domain can be derived from an Old World wild type alphavirus central domain, or vice versa. The various domains can be of any sequence described herein.

[0575] In some embodiments, the self-replicating RNA molecule contains non VEEV nonstructural proteins nsP1, nsP2, nsP3, and nsP4.

[0576] The accumulated experimental evidence has demonstrated that replication/amplification of VEEV and other alphavirus genomes and their defective interfering (DI) RNAs is determined by three promoter elements: (i) the conserved 3′-terminal sequence element (3′ CSE) and the following poly(A) tail; (ii) the 5′ UTR, which functions as a key promoter element for both negative- and positive-strand RNA synthesis; and (iii) the 51-nt conserved sequence element (51-nt CSE), which is located in the nsP1-coding sequence and functions as an enhancer of alphavirus genome replication (Kim et al., PNAS, 2014, 111: 10708-10713, and references therein).

[0577] The self-replicating RNA molecules can comprise an unmodified 5′ untranslated region (5′UTR). Previous studies have demonstrated that during VEEV and Sindbis virus infections, only a small portion of viral nonstructural proteins (nsPs) is colocalized with dsRNA replication intermediates. Thus, it appears that a large fraction of nsPs are not involved in RNA replication (Gorchakov R, et al. (2008) A new role for ns polyprotein cleavage in Sindbis virus replication. J Virol 82(13):6218-6231). This has provided an opportunity to exploit the under used ns proteins for amplification of the subgenomic RNAs encoding proteins of interest, which is normally transcribed from the subgenomic promoter and is not further amplified. In some embodiments, a fragment of the nsP1 is duplicated downstream of the 5′-UTR and upstream of the DLP. In some embodiments the first 193 nucleotides of nsP1 are duplicated downstream of the 5′ UTR and upstream of the DLP.

[0578] The self-replicating RNA molecule can comprise a modified 5′ untranslated region (5′-UTR). For example, the modified 5′-UTR can comprise one or more nucleotide substitutions at position 1, 2, 4, or a combination thereof. Preferably, the modified 5′-UTR comprises a nucleotide substitution at position 2, more preferably, the modified 5′-UTR has a U->G substitution at position 2. Examples of such self-replicating RNA molecules are described in U.S. Patent Application Publication US2018/0104359 and the International Patent Application Publication WO2018/075235, the content of which is incorporated herein by reference in its entirety.

[0579] The UTRs can be wild type New World or Old World alphavirus UTR sequences, or a sequence derived from any of them. The 5′ UTR can be of any suitable length, such as about 60 nt or 50-70 nt or 40-80 nt. In some embodiments the 5′ UTR can also have conserved primary or secondary structures (e.g. one or more stem-loop(s)) and can participate in the replication of alphavirus or of replicon RNA. The 3′ UTR can be up to several hundred nucleotides, for example it can be 50-900 or 100-900 or 50-800 or 100-700 or 200-700 nt. The 3′ UTR also can have secondary structures, e.g. a step loop, and can be followed by a polyadenylate tract or poly-A tail.

[0580] The 5′ and 3′ untranslated regions can be operably linked to any of the other sequences encoded by the replicon. The UTRs can be operably linked to a promoter and/or sequence encoding a protein or peptide by providing sequences and spacing necessary for recognition and transcription of the other encoded sequences.

[0581] One or more genes of interest (e.g. prostate neoantigens) can be expressed under the control of a subgenomic promoter. In certain embodiments, instead of the native subgenomic promoter, the subgenomic RNA can be placed under control of internal ribosome entry site (IRES) derived from encephalomyocarditis viruses (EMCV), Bovine Viral Diarrhea Viruses (BVDV), polioviruses, Foot-and-mouth disease viruses (FMD), enterovirus 71, or hepatitis C viruses. Subgenomic promoters range from 24 nucleotide (Sindbis virus) to over 100 nucleotides (Beet necrotic yellow vein virus) and are usually found upstream of the transcription start.

[0582] The self-replicating RNA molecules can have a 3′ poly-A tail. It can also include a poly-A polymerase recognition sequence (e.g. AAUAAA) near its 3′ end.

[0583] In those instances where the self-replicating RNA molecule is to be packaged into a recombinant alphavirus particle, it can contain one or more sequences, so-called packaging signals, which serve to initiate interactions with alphavirus structural proteins that lead to particle formation. In some embodiments, the alphavirus particles comprise RNA derived from one or more alphaviruses, and structural proteins wherein at least one of said structural proteins is derived from two or more alphaviruses.

### Self-Replicating RNA Molecules Comprising RNA Corresponding to Variants of Engineered Polynucleotides

[0584] Self-replicating RNA molecule comprising RNA corresponding to variants of the polynucleotides or encoding variants of polypeptides or fragments thereof are also disclosed. For example, self-replicating RNA molecules may comprise RNA corresponding the polynucleotide variants comprising one or more substitutions, deletions or insertions, as long as the variants retain or have improved characteristics (such as immunogenicity or stability) when compared to the parent (i.e. non-variant). In some embodiments, the sequence identity may be about 80%, 81%, 82%, 83%, 84%, 85%, 86%, 87%, 88%, 89%, 90%, 91%, 92%, 93%, 94%, 95%, 96%, 97%, 98% or 99% between the parent and the variant. In some embodiments, variants are generated by conservative substitutions.

[0585] In some embodiments, the identity is about 80%. In some embodiments, the identity is about 85%. In some embodiments, the identity is about 90%. In some embodiments, the identity is about 91%. In some embodiments, the identity is about 92%. In some embodiments, the identity is about 93%. In some embodiments, the identity is about 94%. In some embodiments, the identity is about 95%. In some embodiments, the identity is about 96%. In some embodiments, the identity is about 97%. In some embodiments, the identity is about 98%. In some embodiments, the identity is about 99%.

[0586] The variants may comprise 1, 2, 3, 4, 5, 6, 7, 8, 9, 10, 11, 12, 13, 14, 15, 16, 17, 18, 19, or 20 substitutions, deletions or insertions, as long as the variants retain or have improved characteristics (such as immunogenicity or stability) when compared to the parent.

[0587] The percent identity between the two sequences is a function of the number of identical positions shared by the sequences (i.e., % identity=number of identical positions/total number of positions×100), taking into account the number of gaps, and the length of each gap, which need to be introduced for optimal alignment of the two sequences. The percent identity between two amino acid sequences may be determined using the algorithm of E. Meyers and W. Miller (Comput Appl Biosci 4:11-17 (1988)) which has been incorporated into the ALIGN program (version 2.0), using a PAM120 weight residue table, a gap length penalty of 12 and a gap penalty of 4. In addition, the percent identity between two amino acid sequences may be determined using the Needleman and Wunsch (J Mol Biol 48:444-453 (1970)) algorithm which has been incorporated into the GAP program in the GCG software package (available at www_gcg_com), using either a Blossum 62 matrix or a PAM250 matrix, and a gap weight of 16, 14, 12, 10, 8, 6, or 4 and a length weight of 1, 2, 3, 4, 5, or 6.

[0588] The variants of the polypeptides or fragments thereof containing one amino acid alteration generally retain similar tertiary structure and antigenicity relative to the parent. In some instances, the variant may also contain at least one amino acid alteration that causes the variant to have increased antigenicity, increased binding affinity to TCR or to antibody, or both. The variants of the polypeptides may also have improved ability to bind to a HLA molecule.

[0589] The variants may be engineered to contain conservative substitutions. Conservative substitutions are herein defined as exchanges within one of the following five groups: Group 1-small aliphatic, nonpolar or slightly polar residues (Ala, Ser, Thr, Pro, Gly); Group 2-polar, negatively charged residues and their amides (Asp, Asn, Glu, Gin); Group 3-polar, positively charged residues (His, Arg, Lys); Group 4-large, aliphatic, nonpolar residues (Met, Leu, lie, Val, Cys); and Group 5-large, aromatic residues (Phe, Tyr, Trp).

[0590] The variants may be engineered to contain less conservative substitutions, such as the replacement of one amino acid by another that has similar characteristics but is somewhat different in size, such as replacement of an alanine by an isoleucine residue. The variants may also be engineered to contain highly non-conservative substitutions which may involve substituting an acidic amino acid for one that is polar, or even for one that is basic in character.

[0591] Additional substitutions that may be made to generate variants include substitutions that involve structures other than the common L-amino acids. Thus, D-amino and non-standard amino acids (i.e., other than the common naturally occurring proteinogenic amino acids) may also be used for substitution purposes to produce variants with enhanced immunogenicity when compared to the parent.

[0592] If substitutions at more than one position are found to result in polypeptides with substantially equivalent or greater immunogenicity, then combinations of those substitutions may be tested to determine if the combined substitutions result in additive or synergistic effects on the immunogenicity of the variant.

[0593] The amino acid residues that do not substantially contribute to interactions with the TCR may be modified by replacement with other amino acids whose incorporation does not substantially affect T-cell reactivity and does not eliminate binding to the relevant MHC. The amino acid residues that do not substantially contribute to interactions with the TCR may also be deleted as long as the deletion does not substantially affect T-cell reactivity and does not eliminate binding to the relevant MHC.

[0594] In addition, the polypeptides or fragments thereof or variants may be further modified to improve stability and/or binding to MHC molecules in order to elicit a stronger immune response. Methods for such an optimization of a peptide sequence are well known in the art and include, for example, the introduction of reverse peptide bonds or non-peptide bonds. In a reverse peptide bond, amino acid residues are not joined by peptide (—CO—NH—) linkages but the peptide bond is reversed. Such retro-inverso peptidomimetics may be made using methods known in the art. This approach involves making pseudopeptides containing changes involving the backbone, and not the orientation of side chains. Retro-inverse peptides, which contain NH—CO bonds instead of CO—NH peptide bonds are much more resistant to proteolysis. Additional non-peptide bonds that may be used are, for example, —CH₂—NH, —CH₂S—, —CH₂CH₂—, —CH═CH—, —COCH₂—, —CH(OH)CH₂—, and —CH₂SO—.

[0595] The polypeptides, fragments thereof, or variants may be synthesized with additional chemical groups present at their amino and/or carboxy termini, to enhance the stability, bioavailability, and/or affinity of the peptides. For example, hydrophobic groups such as carbobenzoxyl, dansyl, or t-butyloxycarbonyl groups may be added to the amino terminus. Likewise, an acetyl group or a 9-fluorenylmethoxy-carbonyl group may be placed at the amino termini. Additionally, the hydrophobic group, t-butyloxycarbonyl, or an amido group may be added to the carboxy termini.

[0596] Further, the polypeptides, fragments thereof, or variants may be synthesized to alter their steric configuration. For example, the D-isomer of one or more of the amino acid residues of the peptide may be used, rather than the usual L-isomer.

[0597] Similarly, the polypeptides, fragments thereof, or variants may be modified chemically by reacting specific amino acids either before or after synthesis of the polypeptides, fragments thereof, or variants. Examples for such modifications are well known in the art and are summarized e.g. in R. Lundblad, Chemical Reagents for Protein Modification, 3rd ed. CRC Press, 2004 (Lundblad, 2004). Chemical modifications of amino acids include modification by acylation, amidation, pyridoxylation of lysine, reductive alkylation, trinitrobenzylation of amino groups with 2,4,6-trinitrobenzene sulphonic acid (TNBS), amide modification of carboxyl groups and sulphydryl modification by performic acid oxidation of cysteine to cysteic acid, formation of mercurial derivatives, formation of mixed disulphides with other thiol compounds, reaction with maleimide, carboxymethylation with iodoacetic acid or iodoacetamide and carbamoylation with cyanate at alkaline pH, although without limitation thereto. In this regard, the skilled person is referred to Chapter 15 of Current Protocols In Protein Science, Eds. Coligan et al. (John Wiley and Sons NY 1995-2000) (Coligan et al., 1995) for more extensive methodology relating to chemical modification of proteins. Briefly, modification of e.g. arginyl residues in proteins is often based on the reaction of vicinal dicarbonyl compounds such as phenylglyoxal, 2,3-butanedione, and 1,2-cyclohexanedione to form an adduct. Another example is the reaction of methylglyoxal with arginine residues. Cysteine can be modified without concomitant modification of other nucleophilic sites such as lysine and histidine. As a result, a large number of reagents are available for the modification of cysteine. The websites of companies such as Sigma-Aldrich (www_sigma-aldrich) provide information on specific reagents. Selective reduction of disulfide bonds in proteins is also common. Disulfide bonds can be formed and oxidized during the heat treatment of biopharmaceuticals. Woodward's Reagent K may be used to modify specific glutamic acid residues. N-(3-(dimethylamino)propyl)-N′-ethylcarbodiimide can be used to form intra-molecular crosslinks between a lysine residue and a glutamic acid residue. For example, diethylpyrocarbonate is a reagent for the modification of histidyl residues in proteins. Histidine can also be modified using 4-hydroxy-2-nonenal. The reaction of lysine residues and other α-amino groups is, for example, useful in binding of peptides to surfaces or the cross-linking of proteins/peptides. Lysine is the site of attachment of poly(ethylene)glycol and the major site of modification in the glycosylation of proteins. Methionine residues in proteins can be modified with e.g. iodoacetamide, bromoethylamine, and chloramine T. Tetranitromethane and N-acetylimidazole can be used for the modification of tyrosyl residues. Cross-linking via the formation of dityrosine can be accomplished with hydrogen peroxide/copper ions. Recent studies on the modification of tryptophan have used N-bromosuccinimide, 2-hydroxy-5-nitrobenzyl bromide or 3-bromo-3-methyl-2-(2-nitrophenylmercapto)-3H-indole (BPNS-skatole). Successful modification of therapeutic proteins and peptides with PEG is often associated with an extension of circulatory half-life while cross-linking of proteins with glutaraldehyde, polyethylene glycol diacrylate, and formaldehyde is used for the preparation of hydrogels. Chemical modification of allergens for immunotherapy is often achieved by carbamylation with potassium cyanate.

[0598] Disclosed herein are self-replicating RNA molecules comprising a RNA encoding an isolated polypeptide that is about 80%, 81%, 82%, 83%, 84%, 85%, 86%, 87%, 88%, 89%, 90%, 91%, 92%, 93%, 94%, 95%, 96%, 97%, 98% or 99% identical to the polypeptide of SEQ ID NOs: 1, 3, 5, 7, 9, 11, 13, 15, 17, 19, 21, 23, 25, 27, 29, 31, 33, 35, 37, 39, 41, 43, 45, 47, 49, 51, 53, 55, 57, 59, 61, 63, 65, 67, 69, 71, 73, 75, 77, 79, 81, 83, 85, 87, 89, 91, 93, 95, 97, 99, 101, 103, 105, 107, 109, 111, 113, 115, 117, 119, 121, 123, 125, 127, 129, 131, 133, 135, 137, 139, 141, 143, 145, 147, 149, 151, 153, 155, 157, 159, 161, 163, 165, 167, 169, 171, 173, 175, 177, 179, 181, 183, 185, 187, 189, 191, 193, 195, 197, 199, 201, 203, 205, 207, 209, 211, 213, 215, 217, 219, 221, 223, 225, 227, 229, 231, 233, 235, 237, 239, 241, 243, 245, 247, 249, 251, 253, 255, 257, 259, 261, 263, 265, 267, 269, 271, 273, 275, 277, 279, 281, 283, 285, 287, 289, 291, 293, 295, 297, 299, 301, 303, 305, 307, 309, 311, 313, 315, 317, 319, 321, 323, 325, 327, 329, 331, 333, 335, 337, 339, 341, 343, 345, 347, 349, 351, 353, 355, 357, 359, 361, 363, 365, 367, 369, 371, 373, 375, 379, 381, 383, 385, 387, 388, 389, 390, 391, 392, 393, 394, 395, 396, 397, 398, 399, 400, 401, 402, 403, 404, 405, 406, 407, 408, 426, 427, 428, 429, 430, 431, 432, 433, 434, 435, 436, 437, 438, 439, 440, 441, 442, 443, 444, 445, 446, 447, 1001, or 1003.

[0599] Also provided are self-replicating RNA molecules comprising an RNA encoding an isolated polypeptide having 1, 2, 3, 4, 5, 6, 7, 8, 9, 10, 11, 12, 13, 14, 15, 16, 17, 18, 19, or 20 substitutions, deletions, or insertions when compared to the polypeptide of SEQ ID NOs: 1, 3, 5, 7, 9, 11, 13, 15, 17, 19, 21, 23, 25, 27, 29, 31, 33, 35, 37, 39, 41, 43, 45, 47, 49, 51, 53, 55, 57, 59, 61, 63, 65, 67, 69, 71, 73, 75, 77, 79, 81, 83, 85, 87, 89, 91, 93, 95, 97, 99, 101, 103, 105, 107, 109, 111, 113, 115, 117, 119, 121, 123, 125, 127, 129, 131, 133, 135, 137, 139, 141, 143, 145, 147, 149, 151, 153, 155, 157, 159, 161, 163, 165, 167, 169, 171, 173, 175, 177, 179, 181, 183, 185, 187, 189, 191, 193, 195, 197, 199, 201, 203, 205, 207, 209, 211, 213, 215, 217, 219, 221, 223, 225, 227, 229, 231, 233, 235, 237, 239, 241, 243, 245, 247, 249, 251, 253, 255, 257, 259, 261, 263, 265, 267, 269, 271, 273, 275, 277, 279, 281, 283, 285, 287, 289, 291, 293, 295, 297, 299, 301, 303, 305, 307, 309, 311, 313, 315, 317, 319, 321, 323, 325, 327, 329, 331, 333, 335, 337, 339, 341, 343, 345, 347, 349, 351, 353, 355, 357, 359, 361, 363, 365, 367, 369, 371, 373, 375, 379, 381, 383, 385, 387, 388, 389, 390, 391, 392, 393, 394, 395, 396, 397, 398, 399, 400, 401, 402, 403, 404, 405, 406, 407, 408, 426, 427, 428, 429, 430, 431, 432, 433, 434, 435, 436, 437, 438, 439, 440, 441, 442, 443, 444, 445, 446, 447, 1001, or 1003.

[0600] Also provided are self-replicating RNA molecules comprising an RNA corresponding to an isolated polynucleotide that is about 80%, 81%, 82%, 83%, 84%, 85%, 86%, 87%, 88%, 89%, 90%, 91%, 92%, 93%, 94%, 95%, 96%, 97%, 98%, or 99% identical to the polynucleotide of SEQ ID NOs: 2, 4, 6, 8, 10, 12, 14, 16, 18, 20, 22, 24, 26, 28, 30, 32, 34, 36, 38, 40, 42, 44, 46, 48, 50, 52, 54, 56, 58, 60, 62, 64, 66, 68, 70, 72, 74, 76, 78, 80, 82, 84, 86, 88, 90, 92, 94, 96, 98, 100, 102, 104, 106, 108, 110, 112, 114, 116, 118, 120, 122, 124, 126, 128, 130, 132, 134, 136, 138, 140, 142, 144, 146, 148, 150, 152, 154, 156, 158, 160, 162, 164, 166, 168, 170, 172, 174, 176, 178, 180, 182, 184, 186, 188, 190, 192, 194, 196, 198, 200, 202, 204, 206, 208, 210, 212, 214, 216, 218, 220, 222, 224, 226, 228, 230, 232, 234, 236, 238, 240, 242, 244, 246, 248, 250, 252, 254, 256, 258, 260, 262, 264, 266, 268, 270, 272, 274, 276, 278, 280, 282, 284, 286, 288, 290, 292, 294, 296, 298, 300, 302, 304, 306, 308, 310, 312, 314, 316, 318, 320, 322, 324, 326, 328, 330, 332, 334, 336, 338, 340, 342, 344, 346, 348, 350, 352, 354, 356, 358, 360, 362, 364, 366, 368, 370, 372, 374, 376, 380, 382, 384, 386, 448, 449, 450, 451, 452, 453, 454, 455, 456, 457, 458, 1000, or 1002.

[0601] Also provided are self-replicating RNA molecules comprising an RNA encoding an isolated polypeptide that is about 80%, 81%, 82%, 83%, 84%, 85%, 86%, 87%, 88%, 89%, 90%, 91%, 92%, 93%, 94%, 95%, 96%, 97%, 98%, or 99% identical to the polypeptide of SEQ ID NOs: 387, 388, 389, 390, 391, 392, 393, 394, 395, 396, 397, 398, 399, 400, 401, 402, 403, 404, 405, 406, 407, 408, 560, 561, 562, 563, 564, 565, 566, 567, 568, 569, 570, 571, 572, 573, 574, 575, 576, 577, 578, 579, 580, 581, 582, 583, 584, 585, 586, 587, 588, 589, 590, 591, 592, 593, 594, 595, 596, 597, 598, 599, 600, 601, 602, 603, 604, 605, 606, 607, 608, 609, 610, 611, 612, 613, 614, 615, 616, 617, 618, 619, 620, or 621.

[0602] Also provided are self-replicating RNA molecules comprising an RNA encoding an isolated polypeptide that is about 80%, 81%, 82%, 83%, 84%, 85%, 86%, 87%, 88%, 89%, 90%, 91%, 92%, 93%, 94%, 95%, 96%, 97%, 98%,or 99% identical to the polypeptide of SEQ ID NOs: 377, 378, 415, 417, 418, 420, 502, 518, 526, 527, 714, 715, 716, 717, 718, 719, 720, 721, 722, 723, 724, 725, 726, 727, 728, 729, 730, 731, 732, 733, 734, 735, 736, 737, 738, 739, 740, 741, 742, 743, 744, 745, 746, 747, 748, 749, 750, 751, 752, 753, 74, 755, 756, 757, 758, 759, 760, 761, 762, 763, 764, 765, 766, 767, 768, 769, 770, 771, 772, 773, 774, 775, 776, 777, 778, 779, 780, 781, 782, 783, 784, 785, 786, 787, 788, 789, 790, 791, 792, 793, 794, 795, 796, 797, 798, 799, 800, 801, 802, 803, 804, 805, 806, 807, 808, 809, 810, 811, 812, 813, 814, 815, 816, 817, 818, 819, 820, 821, 822, 823, 824, 825, 826, 827, 828, 829, 830, 831, 832, 833, 834, 835, 836, 837, 838, 839, 840, 841, 842, 843, 844, 845, 846, 487, 848, 849, 850, 851, 852, 853, 854, 855, 856, 857, 858, 859, 860, 861, 862, 863, 864, 865, 866, 867, 868, 869, 870, 871, 872, 873, 874, 875, 876, 877, 878, 879, 880, 881, 882, 883, 884, 885, 886, 887, 888, 889, 890, 891, 892, 893, 894, 895, 896, 897, 898, 899, 900, 901, 902, 903, 904, 905, 906, 907, 908, 909, 910, 911, 912, 913, 914, 915, 916, 917, 918, 919, 920, 921, 922, 923, 924, 925, 926, 927, 928, 929, 930, 931, 932, 933, 934, 935, 936, 937, 938, 939, 940, 941, 942, 943, 944, 945, 946, 947, 948, 949, 950, 951, 952, 953, 954, 955, 956, 957, 958, 959, 960, 961, 962, 963, 964, 965, 966, 967, 968, 969, 970, 971, 972, 973, 974, 975, 976, 977, 978, 979, 980, or 548.

[0603] Also provided are self-replicating RNA molecules comprising an RNA encoding an isolated polypeptide that is about 80%, 81%, 82%, 83%, 84%, 85%, 86%, 87%, 88%, 89%, 90%, 91%, 92%, 93%, 94%, 95%, 96%, 97%, 98%, or 99% identical to the polypeptide of SEQ ID NOs: 541, 550, 554, 555, 556, 623, or 624.

[0604] Also provided are self-replicating RNA molecules comprising an RNA corresponding to an isolated polynucleotide that is about 80%, 81%, 82%, 83%, 84%, 85%, 86%, 87%, 88%, 89%, 90%, 91%, 92%, 93%, 94%, 95%, 96%, 97%, 98%, or 99% identical to the polypeptide of SEQ ID NOs: 542 or SEQ ID NO: 551.

[0605] Also provided are self-replicating RNA molecules comprising an RNA encoding an isolated polypeptide that is about 80%, 81%, 82%, 83%, 84%, 85%, 86%, 87%, 88%, 89%, 90%, 91%, 92%, 93%, 94%, 95%, 96%, 97%, 98%, or 99% identical to the polypeptide of SEQ ID NOs: 543, 552, 557, 558, 559, 625, or 626.

[0606] Also provided are self-replicating RNA molecules comprising an RNA corresponding to an isolated polynucleotide that is about 80%, 81%, 82%, 83%, 84%, 85%, 86%, 87%, 88%, 89%, 90%, 91%, 92%, 93%, 94%, 95%, 96%, 97%, 98%, or 99% identical to the polypeptide of SEQ ID NOs: 544 or SEQ ID NO: 553.

[0607] Also provided are self-replicating RNA molecules comprising an RNA encoding an isolated polypeptide comprising an amino acid sequence of SEQ ID NOs: 1, 3, 5, 7, 9, 11, 13, 15, 17, 19, 21, 23, 25, 27, 29, 31, 33, 35, 37, 39, 41, 43, 45, 47, 49, 51, 53, 55, 57, 59, 61, 63, 65, 67, 69, 71, 73, 75, 77, 79, 81, 83, 85, 87, 89, 91, 93, 95, 97, 99, 101, 103, 105, 107, 109, 111, 113, 115, 117, 119, 121, 123, 125, 127, 129, 131, 133, 135, 137, 139, 141, 143, 145, 147, 149, 151, 153, 155, 157, 159, 161, 163, 165, 167, 169, 171, 173, 175, 177, 179, 181, 183, 185, 187, 189, 191, 193, 195, 197, 199, 201, 203, 205, 207, 209, 211, 213, 215, 217, 219, 221, 223, 225, 227, 229, 231, 233, 235, 237, 239, 241, 243, 245, 247, 249, 251, 253, 255, 257, 259, 261, 263, 265, 267, 269, 271, 273, 275, 277, 279, 281, 283, 285, 287, 289, 291, 293, 295, 297, 299, 301, 303, 305, 307, 309, 311, 313, 315, 317, 319, 321, 323, 325, 327, 329, 331, 333, 335, 337, 339, 341, 343, 345, 347, 349, 351, 353, 355, 357, 359, 361, 363, 365, 367, 369, 371, 373, 375, 379, 381, 383, 385, 387, 388, 389, 390, 391, 392, 393, 394, 395, 396, 397, 398, 399, 400, 401, 402, 403, 404, 405, 406, 407, 408, 426, 427, 428, 429, 430, 431, 432, 433, 434, 435, 436, 437, 438, 439, 440, 441, 442, 443, 444, 445, 446, 447, 1001, and 1003, and fragments thereof, wherein the polypeptide comprises one or more reverse peptide bonds.

[0608] Also provided are self-replicating RNA molecules comprising RNA encoding an isolated polypeptide comprising an amino acid sequence of SEQ ID NOs: 387, 388, 389, 390, 391, 392, 393, 394, 395, 396, 397, 398, 399, 400, 401, 402, 403, 404, 405, 406, 407, 408, 560, 561, 562, 563, 564, 565, 566, 567, 568, 569, 570, 571, 572, 573, 574, 575, 576, 577, 578, 579, 580, 581, 582, 583, 584, 585, 586, 587, 588, 589, 590, 591, 592, 593, 594, 595, 596, 597, 598, 599, 600, 601, 602, 603, 604, 605, 606, 607, 608, 609, 610, 611, 612, 613, 614, 615, 616, 617, 618, 619, 620, or 621, wherein the polypeptide comprises one or more reverse peptide bonds.

[0609] Also provided are self-replicating RNA molecules comprising RNA encoding an isolated polypeptide comprising an amino acid sequence of SEQ ID NOs: 377, 378, 415, 417, 418, 420, 502, 518, 526, 527, 714, 715, 716, 717, 718, 719, 720, 721, 722, 723, 724, 725, 726, 727, 728, 729, 730, 731, 732, 733, 734, 735, 736, 737, 738, 739, 740, 741, 742, 743, 744, 745, 746, 747, 748, 749, 750, 751, 752, 753, 74, 755, 756, 757, 758, 759, 760, 761, 762, 763, 764, 765, 766, 767, 768, 769, 770, 771, 772, 773, 774, 775, 776, 777, 778, 779, 780, 781, 782, 783, 784, 785, 786, 787, 788, 789, 790, 791, 792, 793, 794, 795, 796, 797, 798, 799, 800, 801, 802, 803, 804, 805, 806, 807, 808, 809, 810, 811, 812, 813, 814, 815, 816, 817, 818, 819, 820, 821, 822, 823, 824, 825, 826, 827, 828, 829, 830, 831, 832, 833, 834, 835, 836, 837, 838, 839, 840, 841, 842, 843, 844, 845, 846, 487, 848, 849, 850, 851, 852, 853, 854, 855, 856, 857, 858, 859, 860, 861, 862, 863, 864, 865, 866, 867, 868, 869, 870, 871, 872, 873, 874, 875, 876, 877, 878, 879, 880, 881, 882, 883, 884, 885, 886, 887, 888, 889, 890, 891, 892, 893, 894, 895, 896, 897, 898, 899, 900, 901, 902, 903, 904, 905, 906, 907, 908, 909, 910, 911, 912, 913, 914, 915, 916, 917, 918, 919, 920, 921, 922, 923, 924, 925, 926, 927, 928, 929, 930, 931, 932, 933, 934, 935, 936, 937, 938, 939, 940, 941, 942, 943, 944, 945, 946, 947, 948, 949, 950, 951, 952, 953, 954, 955, 956, 957, 958, 959, 960, 961, 962, 963, 964, 965, 966, 967, 968, 969, 970, 971, 972, 973, 974, 975, 976, 977, 978, 979, 980, or 548, wherein the polypeptide comprises one or more reverse peptide bonds.

[0610] Also provided are self-replicating RNA molecules comprising an RNA encoding a polypeptide comprising an amino acid sequence of SEQ ID NOs: 541, 550, 554, 555, 556, 623, or 624, wherein the polypeptide comprises one or more reverse peptide bonds.

[0611] Also provided are self-replicating RNA molecules comprising an RNA encoding a polypeptide comprising an amino acid sequence of SEQ ID NOs: 543, 552, 557, 558, 559, 625, or 626, wherein the polypeptide comprises one or more reverse peptide bonds.

[0612] In some embodiments, the reverse peptide bond comprises an NH—CO bond. In some embodiments, the reverse peptide bond comprises a CH₂—NH, —CH₂S—, —CH₂CH₂—, —CH═CH—, —COCH₂—, —CH(OH)CH₂—, or —CH₂SO— bond.

[0613] Also provided are self-replicating RNA molecules comprising an RNA encoding an isolated polypeptide comprising an amino acid sequence of SEQ ID NOs: 1, 3, 5, 7, 9, 11, 13, 15, 17, 19, 21, 23, 25, 27, 29, 31, 33, 35, 37, 39, 41, 43, 45, 47, 49, 51, 53, 55, 57, 59, 61, 63, 65, 67, 69, 71, 73, 75, 77, 79, 81, 83, 85, 87, 89, 91, 93, 95, 97, 99, 101, 103, 105, 107, 109, 111, 113, 115, 117, 119, 121, 123, 125, 127, 129, 131, 133, 135, 137, 139, 141, 143, 145, 147, 149, 151, 153, 155, 157, 159, 161, 163, 165, 167, 169, 171, 173, 175, 177, 179, 181, 183, 185, 187, 189, 191, 193, 195, 197, 199, 201, 203, 205, 207, 209, 211, 213, 215, 217, 219, 221, 223, 225, 227, 229, 231, 233, 235, 237, 239, 241, 243, 245, 247, 249, 251, 253, 255, 257, 259, 261, 263, 265, 267, 269, 271, 273, 275, 277, 279, 281, 283, 285, 287, 289, 291, 293, 295, 297, 299, 301, 303, 305, 307, 309, 311, 313, 315, 317, 319, 321, 323, 325, 327, 329, 331, 333, 335, 337, 339, 341, 343, 345, 347, 349, 351, 353, 355, 357, 359, 361, 363, 365, 367, 369, 371, 373, 375, 379, 381, 383, 385, 387, 388, 389, 390, 391, 392, 393, 394, 395, 396, 397, 398, 399, 400, 401, 402, 403, 404, 405, 406, 407, 408, 426, 427, 428, 429, 430, 431, 432, 433, 434, 435, 436, 437, 438, 439, 440, 441, 442, 443, 444, 445, 446, 447, 1001, and 1003, and fragments thereof, wherein the polypeptide comprises one or more chemical modifications.

[0614] Also provided are self-replicating RNA molecules comprising an RNA encoding an isolated polypeptide comprising an amino acid sequence of SEQ ID NOs: 387, 388, 389, 390, 391, 392, 393, 394, 395, 396, 397, 398, 399, 400, 401, 402, 403, 404, 405, 406, 407, 408, 560, 561, 562, 563, 564, 565, 566, 567, 568, 569, 570, 571, 572, 573, 574, 575, 576, 577, 578, 579, 580, 581, 582, 583, 584, 585, 586, 587, 588, 589, 590, 591, 592, 593, 594, 595, 596, 597, 598, 599, 600, 601, 602, 603, 604, 605, 606, 607, 608, 609, 610, 611, 612, 613, 614, 615, 616, 617, 618, 619, 620, or 621, wherein the polypeptide comprises one or more chemical modifications.

[0615] Also provided are self-replicating RNA molecules comprising an RNA encoding an isolated polypeptide comprising an amino acid sequence of SEQ ID NOs: 377, 378, 415, 417, 418, 420, 502, 518, 526, 527, 714, 715, 716, 717, 718, 719, 720, 721, 722, 723, 724, 725, 726, 727, 728, 729, 730, 731, 732, 733, 734, 735, 736, 737, 738, 739, 740, 741, 742, 743, 744, 745, 746, 747, 748, 749, 750, 751, 752, 753, 74, 755, 756, 757, 758, 759, 760, 761, 762, 763, 764, 765, 766, 767, 768, 769, 770, 771, 772, 773, 774, 775, 776, 777, 778, 779, 780, 781, 782, 783, 784, 785, 786, 787, 788, 789, 790, 791, 792, 793, 794, 795, 796, 797, 798, 799, 800, 801, 802, 803, 804, 805, 806, 807, 808, 809, 810, 811, 812, 813, 814, 815, 816, 817, 818, 819, 820, 821, 822, 823, 824, 825, 826, 827, 828, 829, 830, 831, 832, 833, 834, 835, 836, 837, 838, 839, 840, 841, 842, 843, 844, 845, 846, 487, 848, 849, 850, 851, 852, 853, 854, 855, 856, 857, 858, 859, 860, 861, 862, 863, 864, 865, 866, 867, 868, 869, 870, 871, 872, 873, 874, 875, 876, 877, 878, 879, 880, 881, 882, 883, 884, 885, 886, 887, 888, 889, 890, 891, 892, 893, 894, 895, 896, 897, 898, 899, 900, 901, 902, 903, 904, 905, 906, 907, 908, 909, 910, 911, 912, 913, 914, 915, 916, 917, 918, 919, 920, 921, 922, 923, 924, 925, 926, 927, 928, 929, 930, 931, 932, 933, 934, 935, 936, 937, 938, 939, 940, 941, 942, 943, 944, 945, 946, 947, 948, 949, 950, 951, 952, 953, 954, 955, 956, 957, 958, 959, 960, 961, 962, 963, 964, 965, 966, 967, 968, 969, 970, 971, 972, 973, 974, 975, 976, 977, 978, 979, 980, or 548, wherein the polypeptide comprises one or more chemical modifications.

[0616] Also provided are self-replicating RNA molecules comprising an isolated polypeptide comprising an amino acid sequence of SEQ ID NOs: 541, 550, 554, 555, 556, 623, or 624, wherein the polypeptide comprises one or more chemical modifications.

[0617] Also provided are self-replicating RNA molecules comprising an RNA encoding an isolated polypeptide comprising an amino acid sequence of SEQ ID NOs: 543, 552, 557, 558, 559, 625, or 626, wherein the polypeptide comprises one or more chemical modifications.

[0618] In some embodiments, the one or more chemical modifications comprise modification with carbobenzoxyl, dansyl, t-butyloxycarbonyl, 9-fluorenylmethoxy-carbonyl, or D-isomer of an amino acid.

### Methods of Making Polynucleotides and Polypeptides

[0619] The polynucleotides or variants may be in the form of RNA or in the form of DNA obtained by cloning or produced synthetically. The DNA may be double-stranded or single-stranded.

[0620] Methods of generating polynucleotides or variants are known in the art and include chemical synthesis, enzymatic synthesis (e.g. in vitro transcription), enzymatic or chemical cleavage of a longer precursor, chemical synthesis of smaller fragments of the polynucleotides followed by ligation of the fragments or known PCR methods. The polynucleotide sequence to be synthesized may be designed with the appropriate codons for the desired amino acid sequence. In general, preferred codons may be selected for the intended host in which the sequence will be used for expression.

[0621] Methods of making polypeptides are known in the art and include standard molecular biology techniques for cloning and expression of the polypeptides and chemical synthesis of the polypeptides.

[0622] Peptides may be synthesized by the Fmoc-polyamide mode of solid-phase peptide synthesis as disclosed by Lukas et al., 1981 and by references as cited therein. Temporary N-amino group protection is afforded by the 9-fluorenylmethyloxycarbonyl (Fmoc) group. Repetitive cleavage of this highly base-labile protecting group is done using 20% piperidine in N, N-dimethylformamide. Side-chain functionalities may be protected as their butyl ethers (in the case of serine threonine and tyrosine), butyl esters (in the case of glutamic acid and aspartic acid), butyloxycarbonyl derivative (in the case of lysine and histidine), trityl derivative (in the case of cysteine) and 4-methoxy-2,3,6-trimethylbenzenesulphonyl derivative (in the case of arginine). Where glutamine or asparagine are C-terminal residues, use is made of the 4,4′-dimethoxybenzhydryl group for protection of the side chain amido functionalities. The solid-phase support is based on a polydimethyl-acrylamide polymer constituted from the three monomers dimethylacrylamide (backbone-monomer), bisacryloylethylene diamine (cross linker) and acryloylsarcosine methyl ester (functionalizing agent). The peptide-to-resin cleavable linked agent used is the acid-labile 4-hydroxymethyl-phenoxyacetic acid derivative. All amino acid derivatives are added as their preformed symmetrical anhydride derivatives with the exception of asparagine and glutamine, which are added using a reversed N, N-dicyclohexyl-carbodiimide/1 hydroxybenzotriazole mediated coupling procedure. All coupling and deprotection reactions are monitored using ninhydrin, trinitrobenzene sulphonic acid or isotin test procedures. Upon completion of synthesis, peptides are cleaved from the resin support with concomitant removal of side-chain protecting groups by treatment with 95% trifluoroacetic acid containing a 50% scavenger mix. Scavengers commonly used include ethanedithiol, phenol, anisole and water, the exact choice depending on the constituent amino acids of the peptide being synthesized. Also a combination of solid phase and solution phase methodologies for the synthesis of peptides is possible (see, for example, (Bruckdorfer et al., 2004), and the references as cited therein).

[0623] U.S. Pat. No. 4,897,445 provides a method for the solid phase synthesis of non-peptide bonds (—CH₂—NH) in polypeptide chains which involves polypeptides synthesized by standard procedures and the non-peptide bond synthesized by reacting an amino aldehyde and an amino acid in the presence of NaCNBH₃.

### Vectors Comprising DNA Encoding the Self-Replicating RNA Molecules

[0624] Vectors comprising DNA encoding the self-replicating RNA molecules are also provided. The disclosed vectors can be used, for example, to generate any of the above-disclosed self-replicating RNA molecules.

[0625] In some embodiments, the DNA encoding the self-replicating RNA molecule is within an alphaviral vector. Alphavirus vectors may be derived from any suitable plus-strand RNA viruses, such as alphaviruses or flaviviruses. The term “alphavirus” describes enveloped single-stranded positive sense RNA viruses of the family Togaviridae. The genus alphavirus contains approximately 30 members, which can infect humans as well as other animals.

[0626] Non-limiting examples of alphavirus species include Eastern equine encephalitis virus (EEEV), Venezuelan equine encephalitis virus (VEEV), Everglades virus (EVEV), Mucambo virus (MUCV), Semliki forest virus (SFV), Pixuna virus (PIXV), Middleburg virus (MIDV), Chikungunya virus (CHIKV), O'Nyong-Nyong virus (ONNV), Ross River virus (RRV), Barmah Forest virus (BF), Getah virus (GET), Sagiyama virus (SAGV), Bebaru virus (BEBV), Mayaro virus (MAYV), Una virus (UNAV), Sindbis virus (STNV), Aura virus (AURAV), Whataroa virus (WHAV), Babanki virus (BABV), Kyzylagach virus (KYZV), Western equine encephalitis virus (WEEV), Highland J virus (HJV), Fort Morgan virus (FMV), Ndumu (NDUV), and Buggy Creek virus. Virulent and avirulent alphavirus strains are both suitable. In some embodiments, the alphavirus RNA replicon is of a Sindbis virus (SIN), a Semliki Forest virus (SFV), a Ross River virus (RRV), a Venezuelan equine encephalitis virus (VEEV), or an Eastern equine encephalitis virus (EEEV). In some embodiments, the alphavirus RNA replicon is of a Venezuelan equine encephalitis virus (VEEV).

[0627] Alphaviruses are classified in the Group IV Togaviridae family of viruses. These viruses carry a positive-sense single-stranded RNA genome, which typically ranges from 11 kb-12 kb. The alphavirus replicons can be 11 kb-12 kb in length, or 10-13 kb, or 7-20 kb or 7-25 kb in length, and can have a 5′ cap and a 3′ poly-A tail, which can be an alphavirus 5′ cap and 3′ poly-A tail. The 5′ cap can be to those persons of known skill in the art, e.g. a 7-methylguanylate cap, or the anti-reverse cap analog 3′-O-Me-m7G(5′)ppp(5′)G or another analog cap structures. Alphavirus particles typically have a 70 nm diameter, tend to be spherical or slightly pleomorphic, and have a 40 nm isometric nucleocapsid.

[0628] Alphavirus vectors are engineered to replace the viral structural genes downstream of the replicase, which are under control of a subgenomic promoter, by genes of interest (GOI), e.g. prostate neoantigens. Sequences of at least one (or all) of the structural viral proteins (e.g. nucleocapsid protein C, and envelope proteins P62, 6K, and E1) are removed and replaced by the coding sequence for at least one protein or peptide (or other gene of interest (GOI)) e.g. the disclosed prostate neoantigens. In these embodiments, the sequences encoding one or more structural genes can be substituted with one or more heterologous sequences such as, for example, a coding sequence for at least one protein or peptide (or other gene of interest (GOI)) e.g. the disclosed prostate neoantigens. Upon transfection, the replicase which is translated immediately, interacts with the 5′ and 3′ termini of the genomic RNA, and synthesizes complementary genomic RNA copies. Those act as templates for the synthesis of novel positive-stranded, capped, and poly-adenylated genomic copies, and subgenomic transcripts (FIG. 9).

[0629] Provided herein are recombinant VEEV derived vector comprising a polynucleotide encoding a polypeptide comprising one or more polypeptides selected from the group consisting of SEQ ID NOs: 1, 3, 5, 7, 9, 11, 13, 15, 17, 19, 21, 23, 25, 27, 29, 31, 33, 35, 37, 39, 41, 43, 45, 47, 49, 51, 53, 55, 57, 59, 61, 63, 65, 67, 69, 71, 73, 75, 77, 79, 81, 83, 85, 87, 89, 91, 93, 95, 97, 99, 101, 103, 105, 107, 109, 111, 113, 115, 117, 119, 121, 123, 125, 127, 129, 131, 133, 135, 137, 139, 141, 143, 145, 147, 149, 151, 153, 155, 157, 159, 161, 163, 165, 167, 169, 171, 173, 175, 177, 179, 181, 183, 185, 187, 189, 191, 193, 195, 197, 199, 201, 203, 205, 207, 209, 211, 213, 215, 217, 219, 221, 223, 225, 227, 229, 231, 233, 235, 237, 239, 241, 243, 245, 247, 249, 251, 253, 255, 257, 259, 261, 263, 265, 267, 269, 271, 273, 275, 277, 279, 281, 283, 285, 287, 289, 291, 293, 295, 297, 299, 301, 303, 305, 307, 309, 311, 313, 315, 317, 319, 321, 323, 325, 327, 329, 331, 333, 335, 337, 339, 341, 343, 345, 347, 349, 351, 353, 355, 357, 359, 361, 363, 365, 367, 369, 371, 373, 375, 379, 381, 383, 385, 387, 388, 389, 390, 391, 392, 393, 394, 395, 396, 397, 398, 399, 400, 401, 402, 403, 404, 405, 406, 407, 408, 426, 427, 428, 429, 430, 431, 432, 433, 434, 435, 436, 437, 438, 439, 440, 441, 442, 443, 444, 445, 446, 447, 1001, and 1003, and fragments thereof.

[0630] In some embodiments, the VEEV derived vector comprises a polypeptide comprising one or more polynucleotides selected from the group consisting of SEQ ID NOs: 2, 4, 6, 8, 10, 12, 14, 16, 18, 20, 22, 24, 26, 28, 30, 32, 34, 36, 38, 40, 42, 44, 46, 48, 50, 52, 54, 56, 58, 60, 62, 64, 66, 68, 70, 72, 74, 76, 78, 80, 82, 84, 86, 88, 90, 92, 94, 96, 98, 100, 102, 104, 106, 108, 110, 112, 114, 116, 118, 120, 122, 124, 126, 128, 130, 132, 134, 136, 138, 140, 142, 144, 146, 148, 150, 152, 154, 156, 158, 160, 162, 164, 166, 168, 170, 172, 174, 176, 178, 180, 182, 184, 186, 188, 190, 192, 194, 196, 198, 200, 202, 204, 206, 208, 210, 212, 214, 216, 218, 220, 222, 224, 226, 228, 230, 232, 234, 236, 238, 240, 242, 244, 246, 248, 250, 252, 254, 256, 258, 260, 262, 264, 266, 268, 270, 272, 274, 276, 278, 280, 282, 284, 286, 288, 290, 292, 294, 296, 298, 300, 302, 304, 306, 308, 310, 312, 314, 316, 318, 320, 322, 324, 326, 328, 330, 332, 334, 336, 338, 340, 342, 344, 346, 348, 350, 352, 354, 356, 358, 360, 362, 364, 366, 368, 370, 372, 374, 376, 380, 382, 384, 386, 448, 449, 450, 451, 452, 453, 454, 455, 456, 457, 458, 1000, and 1002 and fragments thereof.

[0631] Also provided are VEEV derived vectors comprising a polynucleotide encoding a polypeptide comprising one or more polypeptides selected from the group consisting of SEQ ID NOs: 275, 381, 333, 337, 269, 253, 309, 325, 271, 305, 251, 245, 261, 265, 317, 255, 277, 297, 285, 437, 439, 442, 444, 379, 343, 211, 349, 213, 215, 221, 219, 225, 345, 353, 235, 223, 167, 171, 19, 23, 177, 1001, 1003, and fragments thereof.

[0632] In some embodiments, the VEEV vector comprises a polynucleotide comprising one or more polynucleotides selected from the group consisting of SEQ ID NOs: 276, 382, 334, 338, 270, 254, 310, 326, 272, 306, 252, 246, 262, 266, 318, 256, 278, 298, 286, 448, 450, 453, 455, 380, 344, 212, 350, 214, 216, 222, 220, 226, 346, 354, 236, 224, 168, 172, 20, 24, 178, 1000, and 1002 and fragments thereof.

[0633] The alphavirus vector can be a VEEV derived vector wherein the structural viral proteins (e.g. nucleocapsid protein C, and envelope proteins P62, 6K, and E1) are removed and replaced by the coding sequence for at least one protein or peptide (prostate neoantigen)

[0634] In some embodiments, the self-replicating RNA vector is derived from an alphavirus vector. In some embodiments, the self-replicating RNA vector is derived from a VEEV vector

[0635] Provided herein is a DNA construct comprising the vector of SEQ ID NO: 981 and one or more polynucleotides selected from the group consisting of SEQ ID NOs: 2, 4, 6, 8, 10, 12, 14, 16, 18, 20, 22, 24, 26, 28, 30, 32, 34, 36, 38, 40, 42, 44, 46, 48, 50, 52, 54, 56, 58, 60, 62, 64, 66, 68, 70, 72, 74, 76, 78, 80, 82, 84, 86, 88, 90, 92, 94, 96, 98, 100, 102, 104, 106, 108, 110, 112, 114, 116, 118, 120, 122, 124, 126, 128, 130, 132, 134, 136, 138, 140, 142, 144, 146, 148, 150, 152, 154, 156, 158, 160, 162, 164, 166, 168, 170, 172, 174, 176, 178, 180, 182, 184, 186, 188, 190, 192, 194, 196, 198, 200, 202, 204, 206, 208, 210, 212, 214, 216, 218, 220, 222, 224, 226, 228, 230, 232, 234, 236, 238, 240, 242, 244, 246, 248, 250, 252, 254, 256, 258, 260, 262, 264, 266, 268, 270, 272, 274, 276, 278, 280, 282, 284, 286, 288, 290, 292, 294, 296, 298, 300, 302, 304, 306, 308, 310, 312, 314, 316, 318, 320, 322, 324, 326, 328, 330, 332, 334, 336, 338, 340, 342, 344, 346, 348, 350, 352, 354, 356, 358, 360, 362, 364, 366, 368, 370, 372, 374, 376, 380, 382, 384, 386, 448, 449, 450, 451, 452, 453, 454, 455, 456, 457, 458, 459, 460, 461, 462, 463, 464, 465, 466, 467, 468, 469, 470, 471, 472, 473, 474, 475, 476, 477, 478, 479, 480, 481, 482, 483, 484, 485, 486, 487, 488, 489, 490, 491, 492, 493, 494, 495, 496, 497, 498, 499, 500, 501, 503, 504, 505, 506, 507, 508, 509, 510, 511, 512, 513, 514, 515, 516, 517, 519, 520, 521, 522, 523, 524, 525, 528, 529, 530, 531, 532, 533, 534, 535, 536, 537, 538, 539, 540, 1000, and 1002, and fragments thereof.

[0636] The self-replicating RNA vectors can comprise any regulatory elements to establish conventional function(s) of the vector, including but not limited to replication and expression of the prostate neoantigens encoded by the polynucleotide sequence of the vector. Regulatory elements include, but are not limited to, a promoter, an enhancer, a polyadenylation signal, translation stop codon, a ribosome binding element, a transcription terminator, selection markers, origin of replication, etc. A vector can comprise one or more expression cassettes. An “expression cassette” is part of a vector that directs the cellular machinery to make RNA and protein. An expression cassette typically comprises three components: a promoter sequence, an open reading frame, and a 3′-untranslated region (UTR) optionally comprising a polyadenylation signal. An open reading frame (ORF) is a reading frame that contains a coding sequence of a protein of interest (e.g., prostate neoantigen) from a start codon to a stop codon. Regulatory elements of the expression cassette can be operably linked to a polynucleotide sequence encoding a prostate neoantigen of interest. Any components suitable for use in an expression cassette described herein can be used in any combination and in any order to prepare vectors.

[0637] The vector can comprise a promoter sequence, preferably within an expression cassette, to control expression of a prostate neoantigen genes of interest. The term “promoter” is used in its conventional sense and refers to a nucleotide sequence that initiates the transcription of an operably linked nucleotide sequence. A promoter is located on the same strand near the nucleotide sequence it transcribes. Promoters can be a constitutive, inducible, or repressible. Promoters can be naturally occurring or synthetic. A promoter can be derived from sources including viral, bacterial, fungal, plants, insects, and animals. A promoter can be a homologous promoter (i.e., derived from the same genetic source as the vector) or a heterologous promoter (i.e., derived from a different vector or genetic source). Preferably, the promoter is located upstream of the polynucleotide encoding a prostate neoantigen within an expression cassette. For example, the promoter can be a subgenomic promoter for the alphavirus.

[0638] The vector can comprise additional polynucleotide sequences that stabilize the expressed transcript, enhance nuclear export of the RNA transcript, and/or improve transcriptional-translational coupling. Examples of such sequences include polyadenylation signals and enhancer sequences. A polyadenylation signal is typically located downstream of the coding sequence for a protein of interest (e.g., a prostate neoantigen) within an expression cassette of the vector. Enhancer sequences are regulatory DNA sequences that, when bound by transcription factors, enhance the transcription of an associated gene. An enhancer sequence is preferably located upstream of the polynucleotide sequence encoding a prostate neoantigen antigen, but downstream of a promoter sequence within an expression cassette of the vector.

[0639] Any enhancer sequence known to those skilled in the art can be used.

[0640] Any of the components or sequences of the self-replicating RNA vector can be functionally or operably linked to any other of the components or sequences. The components or sequences of the self-replicating RNA molecule can be operably linked for the expression of the at least one protein or peptide (or biotherapeutic) in a host cell or treated organism and/or for the ability of the replicon to self-replicate.

[0641] The term “operably linked” denotes a functional linkage between two or more sequences that are configured so as to perform their usual function. Thus, a promoter or UTR operably linked to a coding sequence is capable of effecting the transcription and expression of the coding sequence when the proper enzymes are present. The promoter need not be contiguous with the coding sequence, so long as it functions to direct the expression thereof. Thus, an operable linkage between an RNA sequence encoding a protein or peptide and a regulatory sequence (for example, a promoter or UTR) is a functional link that allows for expression of the polynucleotide of interest. Operably linked can also refer to sequences such as the sequences encoding the RdRp (e.g. nsP4), nsP1-4, the UTRs, promoters, and other sequences encoding in the RNA replicon, are linked so that they enable transcription and translation of the biotherapeutic molecule and/or replication of the replicon. The UTRs can be operably linked by providing sequences and spacing necessary for recognition and translation by a ribosome of other encoded sequences. As used herein, the term “operably linked” is to be taken in its broadest reasonable context and refers to a linkage of polynucleotide elements in a functional relationship. A polynucleotide is “operably linked” when it is placed into a functional relationship with another polynucleotide. For instance, a promoter is operably linked to a coding sequence if it affects the transcription of the coding sequence.

[0642] A molecule is functional or biologically active if it performs at least 50% of the same activity as its natural (or wild type), corresponding molecule, but a functional molecule can also perform at least 60% or at least 70% or at least 90% or at least 95% or 100% of the same activity as its natural (or wild type) corresponding molecule. The self-replicating RNA molecules can also encode an amino acid sequence derived from or based on a wild type alphavirus amino acid sequence, meaning that they have at least 60% or at least 65% or at least 68% or at least 70% or at least 80% or at least 85% or at least 90% or at least 95% or at least 97% or at least 98% or at least 99% or 100% or 80-99% or 90-100% or 95-99% or 95-100% or 97-99% or 98-99% sequence identity with an amino acid sequence (which can be a corresponding sequence) encoded by a wild type RNA alphavirus genome, which can be a New World or Old World alphavirus genome. Sequences derived from other sequences can be up to 5% or up to 10% or up to 20% or up to 30% longer or shorter than the original sequence. The sequence identity can be at least 95% or at least 97% or at least 98% or at least 99% or 100% for any nucleotide sequence encoding (or amino acid sequence having) a G3BP or FXR binding site thereon. These sequences can also be up to 5% or up to 10% or up to 20% or up to 30% longer or shorter than the original sequence.

### Self-Replicating RNA Delivery Vehicles

[0643] The self-replicating RNA molecules can be packaged, for example, into recombinant virus particles, such as recombinant alphavirus particles, or in lipid nanoparticles (LNP). The self-replicating RNA molecules may be at least 1 kb or at least 2 kb or at least 3 kb or at least 4 kb or at least 5 kb or at least 6 kb or at least 7 kb or at least 8 kb or at least 9 kb or at least 10 kb or at least 12 kb or at least 15 kb or at least 17 kb or at least 19 kb or at least 20 kb in size, or can be 100 bp-8 kb or 500 bp-8 kb or 500 bp-7 kb or 1-7 kb or 1-8 kb or 2-15 kb or 2-20 kb or 5-15 kb or 5-20 kb or 7-15 kb or 7-18 kb or 7-20 kb in size.

[0644] The self-replicating RNA molecules can be packaged or encapsulated in lipids. In some embodiments, the self-replicating RNA molecule can be packaged or encapsulated in cationic molecules, such as, polyamidoamine (Haensler and Szoka, 1993, Bioconjugate Chem. 4: 372-379), dendritic polylysine (Int. Pat. Publ. No. WO1995/24221), polyethylene irinine or polypropylene h-nine (Int. Pat. Publ. No. WO1996/02655), polylysine (U.S. Pat. No. 5,595,897), chitosan (U.S. Pat. No. 5,744,166), DNA-gelatin coarcervates (see, e.g., U.S. Pat. Nos. 6,207,195; 6,025,337; 5,972,707) or DEAE dextran (Lopata, et al., 1984, Nucleic Acid Res. 12: 5707-5717), dendrimers (see, e.g., WO1996/19240), or polyethylenimine (PEI) (see, e.g., Sun et al., 2014, Mol Med Rep. 10(5):2657-2662).

[0645] The self-replicating RNA molecules and/or compositions comprising the self-replicating RNA molecules can be formulated using one or more liposomes, lipoplexes, and/or lipid nanoparticles. In some embodiments, pharmaceutical formulations of the self-replicating RNA molecules include liposomes (FIG. 11). Liposomes are artificially-prepared vesicles which can primarily be composed of a lipid bilayer and can be used as a delivery vehicle for the administration of nutrients and pharmaceutical formulations. Liposomes can be of different sizes such as, but not limited to, a multilamellar vesicle (MLV) which can be hundreds of nanometers in diameter and can contain a series of concentric bilayers separated by narrow aqueous compartments, a small unicellular vesicle (SUV) which can be smaller than 50 nm in diameter, and a large unilamellar vesicle (LUV) which can be between 50 and 500 nm in diameter. Liposome design can include, but is not limited to, opsonins or ligands in order to improve the attachment of liposomes to unhealthy tissue or to activate events such as, but not limited to, endocytosis. Liposomes can contain a low or a high pH in order to improve the delivery of the pharmaceutical formulations.

[0646] The formation of liposomes can depend on the physicochemical characteristics such as, but not limited to, the pharmaceutical formulation entrapped and the liposomal ingredients, the nature of the medium in which the lipid vesicles are dispersed, the effective concentration of the entrapped substance and its potential toxicity, any additional processes involved during the application and/or delivery of the vesicles, the optimization size, polydispersity and the shelf-life of the vesicles for the intended application, and the batch-to-batch reproducibility and possibility of large-scale production of safe and efficient liposomal products.

[0647] In some embodiments, the self-replicating RNA molecule is encapsulated in, bound to, or adsorbed on a liposome, a lipoplex, a lipid nanoparticle, or combinations thereof. In some embodiments, the self-replicating RNA molecule is encapsulated in a lipid nanoparticle.

[0648] The self-replicating RNA molecule can be fully encapsulated within the lipid portion of the particle, thereby protecting the RNA from nuclease degradation. “Fully encapsulated” means that the RNA is not significantly degraded after exposure to serum or a nuclease assay that would significantly degrade free RNA. When fully encapsulated, preferably less than 25% of the nucleic acid in the particle is degraded in a treatment that would normally degrade 100% of free nucleic acid, more preferably less than 10%, and most preferably less than 5% of the nucleic acid in the particle is degraded. “Fully encapsulated” also means that the nucleic acid-lipid particles do not rapidly decompose into their component parts upon in vivo administration.

[0649] In some embodiments, the encapsulated self-replicating RNA molecule is encapsulated in a lipid nanoparticle.

[0650] In some embodiments, the lipid nanoparticles comprise an RNA, a cationic lipid (e.g., one or more cationic lipids or salts thereof), a phospholipid, and a conjugated lipid that inhibits aggregation of the particles (e.g., one or more PEG-lipid conjugates). The lipid particles can also include cholesterol. The lipid particles may comprise at least 1, 2, 3, 4, 5, 6, 7, 8, 9, 10, or more RNA that express one or more polypeptides.

[0651] Also provided are encapsulated self-replicating RNA molecules, wherein the lipid nanoparticle comprises an RNA, a cationic lipid, a phospholipid cholesterol and/or a conjugated lipid.

[0652] In some embodiments, the self-replicating RNA molecules and/or compositions comprising the same can be formulated in a lipid vesicle which can have crosslinks between functionalized lipid bilayers. In some embodiments, the self-replicating RNA molecules and/or compositions can be formulated in a lipid-polycation complex. The formation of the lipid-polycation complex can be accomplished by methods known in the art. As a non-limiting example, the polycation can include a cationic peptide or a polypeptide such as, but not limited to, polylysine, polyornithine and/or polyarginine and the cationic peptides. In some embodiments, the self-replicating RNA molecules and/or compositions can be formulated in a lipid-polycation complex which can further include a neutral lipid such as, but not limited to, cholesterol or dioleoyl phosphatidylethanolamine (DOPE). The liposome formulation can be influenced by, but not limited to, the selection of the cationic lipid component, the degree of cationic lipid saturation, the nature of the PEGylation, ratio of all components and biophysical parameters such as size.

[0653] In some embodiments, the LNP formulations comprising a polycationic composition can be used for the delivery of the modified RNA described herein in vivo and/or ex vitro. The disclosure further provides a LNP formulations comprising a cationic lipid.

[0654] The terms “cationic lipid” and “amino lipid” are used interchangeably herein to include those lipids and salts thereof having one, two, three, or more fatty acid or fatty alkyl chains and a pH-titratable amino head group (e.g., an alkylamino or dialkylamino head group). The cationic lipid is typically protonated (i.e., positively charged) at a pH below the pKa of the cationic lipid and is substantially neutral at a pH above the pKa. The cationic lipids of the invention may also be termed titratable cationic lipids. In some embodiments, the cationic lipids comprise: a protonatable tertiary amine (e.g., pH-titratable) head group; C18 alkyl chains, wherein each alkyl chain independently has 0 to 3 (e.g., 0, 1, 2, or 3) double bonds; and ether, ester, or ketal linkages between the head group and alkyl chains. Such cationic lipids include, but are not limited to, DSDMA, DODMA, DLinDMA, DLenDMA, γ-DLenDMA, DLin-K-DMA, DLin-K-C2-DMA (also known as DLin-C2K-DMA, XTC2, and C2K), DLin-K-C3-DM A, DLin-K-C4-DMA, DLen-C2K-DMA, y-DLen-C2K-DMA, DLin-M-C2-DMA (also known as MC2), DLin-M-C3-DMA (also known as MC3) and (DLin-MP-DMA)(also known as 1-B1 1).

[0655] The disclosure also provides an encapsulated self-replicating RNA molecule, wherein the cationic lipid comprises a protonatable tertiary amine.

[0656] In some embodiment, the cationic lipid is dn(Z)-non-2-en-1-yl) 8,8′-((((2-(dimethylamino)ethyl)thio)carbonyl)azanediyl)dioctanoate.

[0657] The cationic lipid compounds can be relatively non-cytotoxic. The cationic lipid compounds may be biocompatible and biodegradable. The cationic lipid may have a pKa in the range of approximately 5.5 to approximately 7.5, more preferably between approximately 6.0 and approximately 7.0.

[0658] The cationic lipid compounds are particularly attractive for drug delivery for several reasons: they contain amino groups for interacting with DNA, RNA, other polynucleotides, and other negatively charged agents, for buffering the pH, for causing endo-osmolysis, for protecting the self-replicating RNA molecule to be delivered, they can be synthesized from commercially available starting materials; and/or they are pH responsive and can be engineered with a desired pKa.

[0659] Lipid nanoparticle formulations can be improved by replacing the cationic lipid with a biodegradable cationic lipid which is known as a rapidly eliminated lipid nanoparticle (reLNP). Ionizable cationic lipids, such as, but not limited to, DLinDMA, DLin-KC2-DMA, and DLin-MC3-DMA, have been shown to accumulate in plasma and tissues over time and can be a potential source of toxicity. The rapid metabolism of the rapidly eliminated lipids can improve the tolerability and therapeutic index of the lipid nanoparticles by an order of magnitude from a 1 mg/kg dose to a 10 mg/kg dose in rat. Inclusion of an enzymatically degraded ester linkage can improve the degradation and metabolism profile of the cationic component, while still maintaining the activity of the reLNP formulation. The ester linkage can be internally located within the lipid chain or it can be terminally located at the terminal end of the lipid chain The internal ester linkage can replace any carbon in the lipid chain The lipid particles may comprise a lipid conjugate. The conjugated lipid is useful in that it prevents the aggregation of particles. Suitable conjugated lipids include, but are not limited to, PEG-lipid conjugates, cationic-polymer-lipid conjugates, and mixtures thereof.

[0660] PEG is a linear, water-soluble polymer of ethylene PEG repeating units with two terminal hydroxyl groups. PEGs are classified by their molecular weights; and include the following: monomethoxypolyethylene glycol (MePEG-OH), monomethoxypolyethylene glycol-succinate (MePEG-S), monomethoxypolyethylene glycol-succinimidyl succinate (MePEG-S-NHS), monomethoxypolyethylene glycol-amine (MePEG-NH2), monomethoxypolyethylene glycol-tresylate (MePEG-TRES), monomethoxypolyethylene glycol-imida-zolyl-carbonyl (MePEG-IM), as well as such compounds containing a terminal hydroxyl group instead of a terminal methoxy group (e.g., HO-PEG-S, HO-PEG-S-NHS, HO-PEG-NH2).

[0661] The PEG moiety may comprise an average molecular weight ranging from 550 daltons to 10,000 daltons.

[0662] The self-replicating RNA molecules can be encapsulated in a lipid nanoparticle comprising a conjugated lipid, wherein the conjugated lipid is a PEG-lipid. Examples of PEG-lipids include, but are not limited to, PEG coupled to dialkyloxypropyls (PEG-DAA), PEG coupled to diacylglycerol (PEG-DAG), PEG coupled to phospholipids such as phosphatidylethanolamine (PEG-PE), PEG conjugated to ceramides, PEG conjugated to cholesterol or a derivative thereof, and mixtures thereof.

[0663] In some embodiments, the conjugated lipid is a PEG-lipid.

[0664] In some embodiments, the conjugated lipid is a DMG-PEG-2000.

[0665] The self-replicating RNA molecules can also be formulated in a particle comprising non-cationic lipids. Suitable non-cationic lipids include, for example, neutral uncharged, zwitterionic, or anionic lipids capable of producing a stable complex. Non-limiting examples of non-cationic lipids include phospholipids such as lecithin, phosphatidylethanolamine, lysolecithin, lysophosphatidylethanolamine, phosphatidylserine, phosphatidylinositol, sphingomyelin, egg sphingomyelin (ESM), cephalin, cardiolipin, phosphatidic acid, cerebrosides, dicetylphosphate, distearoylphosphatidylcholine (DSPC), dioleoylphosphatidylcholine (DOPC), dipalmitoylphosphatidylcholine (DPPC), dioleoylphosphatidylglycerol (DOPG), dipalmitoylphosphatidylglycerol (DPPG), dioleoylphosphatidylethanolamine (DOPE), palmitoyloleoyl-phosphatidylcholine (POPC), palmitoylo-leoyl-phosphatidylethanolamine (POPE), palmitoyloleyol-phosphatidylglycerol (POPG), dioleoylphosphatidylethanolamine 4-(N-maleimidomethyl)-cyclohexane-1-carboxylate (DOPE-mal), phosphatidylethanolamine, phosphatidylethanolaminedipalmitoyl-dimyristoyl-distearoyl-monomethyl-dimethyl-dielaidoyl-stearoyloleoyl-phosphatidylethanolamine (SOPE), lysophosphatidylcholine, dilinoleoylphosphatidylcholine, and mixtures thereof. Other diacylphosphatidylcholine and diacylphosphatidylethanolamine phospholipids can also be used. The acyl groups in these lipids are preferably acyl groups derived from fatty acids having C10-C24 carbon chains, e.g., lauroyl, myristoyl, palmitoyl, stearoyl, or oleoyl.

[0666] Additional examples of non-cationic lipids include sterols such as cholesterol and derivatives thereof. Non-limiting examples of cholesterol derivatives include polar analogues such as 5a-cholestanol, 5a-coprostanol, cholesteryl-(2′-hy-droxy)-ethyl ether, cholesteryl-(4′-hydroxy)-butyl ether, and 6-ketocholestanol; non-polar analogues such as 5a-choles-tane, cholestenone, 5a-cholestanone, 5a-cholestanone, and cholesteryl decanoate; and mixtures thereof. In preferred embodiments, the cholesterol derivative is a polar analogue such as cholesteryl-(4′-hydroxy)-butyl ether. In some embodiments, the phospholipid is DSPC. In some embodiments, the non-cationic lipid present in lipid particles comprises or consists of a mixture of one or more phospholipids and cholesterol or a derivative thereof. In some embodiments where the lipid particles contain a mixture of phospholipid and cholesterol or a cholesterol derivative, the mixture may comprise up to 40 mol %, 45 mol %, 50 mol %, 55 mol %, or 60 mol % of the total lipid present in the particle.

[0667] A composition containing a cationic lipid compound may be 30-70% cationic lipid compound, 0-60% cholesterol, 0-30% phospholipid and 1-10% polyethylene glycol (PEG).

[0668] In some embodiments, the cationic lipid, zwitterion lipid, cholesterol and conjugated lipid are combined in a molar ratio of 50:7:40:3, respectively in the lipid nanoparticle.

[0669] In some embodiments, the LNP formulations can additionally comprise a permeability enhancer molecule. The nanoparticle formulations can be a carbohydrate nanoparticle comprising a carbohydrate carrier and self-replicating RNA. As a non-limiting example, the carbohydrate carrier can include, but is not limited to, an anhydride-modified phytoglycogen or glycogen-type material, phtoglycogen octenyl succinate, phytoglycogen beta-dextrin, and anhydride-modified phytoglycogen beta-dextrin.

[0670] The self-replicating RNA molecules and/or compositions comprising the same can also be formulated as a nanoparticle using a combination of polymers, lipids, and/or other biodegradable agents, such as, but not limited to, calcium phosphate, polymers. Components can be combined in a core-shell, hybrid, and/or layer-by-layer architecture, to allow for fine-tuning of the nanoparticle so that delivery of the molecules and/or compositions of the disclosure can be enhanced.

[0671] Methods of delivery are not limited to the above described embodiments, and any means for intracellular delivery can be used.

### Vaccines, Methods of Inducing an Immune Response, and Methods of Treating or Preventing Prostate Cancer

[0672] Also provided herein are vaccines comprising any of the disclosed prostate cancer neoantigens. The disclosed vaccines can comprise a vector containing the prostate cancer neoantigen or a nucleic acid encoding the prostate cancer neoantigen.

[0673] The preparation of vaccine compositions is well known. Vaccines may comprise or may be formulated into a pharmaceutical composition comprising the vaccine and a pharmaceutically acceptable excipient. “Pharmaceutically acceptable” refers to the excipient that at the dosages and concentrations employed, will not cause unwanted or harmful effects in the subjects to which they are administered and include carrier, buffers, stabilizers or other materials well known to those skilled in the art. The precise nature of the carrier or other material may depend on the route of administration, e.g., intramuscular, subcutaneous, oral, intravenous, cutaneous, intramucosal (e.g., gut), intranasal or intraperitoneal routes. Liquid carriers such as water, petroleum, animal or vegetable oils, mineral oil or synthetic oil may be included. Physiological saline solution, dextrose or other saccharide solution or glycols such as ethylene glycol, propylene glycol or polyethylene glycol may be included. Exemplary viral formulation are the Adenovirus World Standard (Hoganson et al., 2002): 20 mM Tris pH 8, 25 mM NaCl, 2.5% glycerol; or 20 mM Tris, 2 mM MgCl₂, 25 mM NaCl, sucrose 10% w/v, polysorbate-80 0.02% w/v; or 10-25 mM citrate buffer pH 5.9-6.2, 4-6% (w/w) hydroxypropyl-beta-cyclodextrin (HBCD), 70-100 mM NaCl, 0.018-0.035% (w/w) polysorbate-80, and optionally 0.3-0.45% (w/w) ethanol. Many other buffers can be used, and examples of suitable formulations for the storage and for pharmaceutical administration of purified pharmaceutical preparations are known.

[0674] The vaccine may comprise one or more adjuvants. Suitable adjuvants include QS-21, Detox-PC, MPL-SE, MoGM-CSF, TiterMax-G, CRL-1005, GERBU, TERamide, PSC97B, Adjumer, PG-026, GSK-I, GcMAF, B-alethine, MPC-026, Adjuvax, CpG ODN, Betafectin, Alum, and MF59. Other adjuvants that may be used include lectins, growth factors, cytokines and lymphokines such as alpha-interferon, gamma interferon, platelet derived growth factor (PDGF), granulocyte-colony stimulating factor (gCSF), granulocyte macrophage colony stimulating factor (gMCSF), tumor necrosis factor (TNF), epidermal growth factor (EGF), IL-1, IL-2, IL-4, IL-6, IL-8, IL-10, IL-12 or TLR agonists.

[0675] “Adjuvant” and “immune stimulant” are used interchangeably herein and are defined as one or more substances that cause stimulation of the immune system. In this context, an adjuvant is used to enhance an immune response to the vaccines or viral vectors described herein. The adjuvant can be present in a composition or administered in a separate composition. An adjuvant can be, e.g., a small molecule or an antibody. Examples of adjuvants suitable for use in the application include, but are not limited to, immune checkpoint inhibitors (e.g., anti-PD1, anti-TIM-3, etc.), toll-like receptor agonists (e.g., TLR7 and/or TLR8 agonists), RIG-1 agonists, IL-15 superagonists (Altor Bioscience), mutant IRF3 and IRF7 genetic adjuvants, STING agonists (Aduro), FLT3L genetic adjuvant, IL12 genetic adjuvant, and IL-7-hyFc.

[0676] The disclosed vaccines can comprise any of the self-replicating RNA molecules disclosed herein. The vaccine can comprise a self-replicating RNA molecule comprising an RNA encoding one or more polypeptides selected from the group consisting of SEQ ID NOs: 1, 3, 5, 7, 9, 11, 13, 15, 17, 19, 21, 23, 25, 27, 29, 31, 33, 35, 37, 39, 41, 43, 45, 47, 49, 51, 53, 55, 57, 59, 61, 63, 65, 67, 69, 71, 73, 75, 77, 79, 81, 83, 85, 87, 89, 91, 93, 95, 97, 99, 101, 103, 105, 107, 109, 111, 113, 115, 117, 119, 121, 123, 125, 127, 129, 131, 133, 135, 137, 139, 141, 143, 145, 147, 149, 151, 153, 155, 157, 159, 161, 163, 165, 167, 169, 171, 173, 175, 177, 179, 181, 183, 185, 187, 189, 191, 193, 195, 197, 199, 201, 203, 205, 207, 209, 211, 213, 215, 217, 219, 221, 223, 225, 227, 229, 231, 233, 235, 237, 239, 241, 243, 245, 247, 249, 251, 253, 255, 257, 259, 261, 263, 265, 267, 269, 271, 273, 275, 277, 279, 281, 283, 285, 287, 289, 291, 293, 295, 297, 299, 301, 303, 305, 307, 309, 311, 313, 315, 317, 319, 321, 323, 325, 327, 329, 331, 333, 335, 337, 339, 341, 343, 345, 347, 349, 351, 353, 355, 357, 359, 361, 363, 365, 367, 369, 371, 373, 375, 379, 381, 383, 385, 387, 388, 389, 390, 391, 392, 393, 394, 395, 396, 397, 398, 399, 400, 401, 402, 403, 404, 405, 406, 407, 408, 426, 427, 428, 429, 430, 431, 432, 433, 434, 435, 436, 437, 438, 439, 440, 441, 442, 443, 444, 445, 446, 447, 1001, 1003, and fragments thereof.

[0677] The vaccine can comprise a self-replicating RNA molecule comprising an RNA encoding one or more polypeptides selected from the group consisting of SEQ ID NOs: 275, 381, 333, 337, 269, 253, 309, 325, 271, 305, 251, 245, 261, 265, 317, 255, 277, 297, 285, 437, 439, 442, 444, 379, 343, 211, 349, 213, 215, 221, 219, 225, 345, 353, 235, 223, 167, 171, 19, 23, 177, 1001, 1003, and fragments thereof.

[0678] The vaccine can comprise a self-replicating RNA molecule comprising an RNA encoding a polypeptide of SEQ ID NOs: 541, 543, 550, 552, 554, 555, 556, 557, 558, 559, 623, 624, 625, 626, 1004, or 1005.

[0679] The vaccine can comprise a self-replicating RNA molecule comprising an RNA corresponding to one or more polynucleotides selected from the group consisting of SEQ ID NOs: 2, 4, 6, 8, 10, 12, 14, 16, 18, 20, 22, 24, 26, 28, 30, 32, 34, 36, 38, 40, 42, 44, 46, 48, 50, 52, 54, 56, 58, 60, 62, 64, 66, 68, 70, 72, 74, 76, 78, 80, 82, 84, 86, 88, 90, 92, 94, 96, 98, 100, 102, 104, 106, 108, 110, 112, 114, 116, 118, 120, 122, 124, 126, 128, 130, 132, 134, 136, 138, 140, 142, 144, 146, 148, 150, 152, 154, 156, 158, 160, 162, 164, 166, 168, 170, 172, 174, 176, 178, 180, 182, 184, 186, 188, 190, 192, 194, 196, 198, 200, 202, 204, 206, 208, 210, 212, 214, 216, 218, 220, 222, 224, 226, 228, 230, 232, 234, 236, 238, 240, 242, 244, 246, 248, 250, 252, 254, 256, 258, 260, 262, 264, 266, 268, 270, 272, 274, 276, 278, 280, 282, 284, 286, 288, 290, 292, 294, 296, 298, 300, 302, 304, 306, 308, 310, 312, 314, 316, 318, 320, 322, 324, 326, 328, 330, 332, 334, 336, 338, 340, 342, 344, 346, 348, 350, 352, 354, 356, 358, 360, 362, 364, 366, 368, 370, 372, 374, 376, 380, 382, 384, 386, 448, 449, 450, 451, 452, 453, 454, 455, 456, 457, 458, 459, 460, 461, 462, 463, 464, 465, 466, 467, 468, 469, 470, 471, 472, 473, 474, 475, 476, 477, 478, 479, 480, 481, 482, 483, 484, 485, 486, 487, 488, 489, 490, 491, 492, 493, 494, 495, 496, 497, 498, 499, 500, 501, 503, 504, 505, 506, 507, 508, 509, 510, 511, 512, 513, 514, 515, 516, 517, 519, 520, 521, 522, 523, 524, 525, 528, 529, 530, 531, 532, 533, 534, 535, 536, 537, 538, 539, 540, 1000, 1002, and fragments thereof.

[0680] The vaccine can comprise a self-replicating RNA molecule comprising an RNA corresponding to one or more polynucleotides selected from the group consisting of SEQ ID NOs: 276, 382, 334, 338, 270, 254, 310, 326, 272, 306, 252, 246, 262, 266, 318, 256, 278, 298, 286, 448, 450, 453, 455, 380, 344, 212, 350, 214, 216, 222, 220, 226, 346, 354, 236, 224, 168, 172, 20, 24, 178, 1000, 1002, and fragments thereof.

[0681] For example, a polynucleotide of SEQ ID NO: 542 encoding a polypeptide of SEQ ID NO: 541 may be used to generate self-replicating RNA molecule-based prostate cancer vaccines. Alternatively, polynucleotides encoding polypeptides of SEQ ID NOs: 550, 554, 555, 556, 623 or 624 may also be used in the self-replicating RNA molecule-based vaccines. In addition to the polynucleotide encoding the combination of the 41 neoantigens, additional facilitator elements may be included to the 5′ or 3′ of the polynucleotide, such as regulatory sequences, tags, and the like. Exemplary facilitator elements include CMV promoter, vaccinia P7.5 promoter, TetO repressor, Kozak sequence, a polynucleotide encoding a T cell enhancer (TCE), a polynucleotide encoding a histidine tag, one or more stop codons, a polyadenylation signal or a promoter sequence. Exemplary polynucleotide sequences of the facilitator elements comprise CMVTetO promoter comprising SEQ ID NO: 628, Kozak sequence comprising SEQ ID NO: 545, the polynucleotide encoding the TCE comprising SEQ ID NO: 546, the polynucleotide encoding the histidine tag comprising SEQ ID NO: 547, a BGH polyadenylation site comprising SEQ ID NO: 629, the one or more stop codons comprising the polynucleotide sequence of TAGTAA, the CMV promoter comprising a polynucleotide of SEQ ID NO: 628 or the vaccinia P7.5 promoter comprising a polynucleotide of SEQ ID NO: 630. Thus the polynucleotide comprising one or more additional facilitator sequences comprises the polynucleotide sequence of SEQ ID NO: 551, encoding the polypeptide of SEQ ID NO: 550.

[0682] Also provided herein are vaccines that comprise recombinant viruses comprising the disclosed prostate cancer neoantigens. Suitable recombinant viruses can be derived from an adenovirus (Ad), a poxvirus, an adeno-associated virus (AAV), or a retrovirus.

[0683] Adenovirus may be derived from human adenovirus (Ad) but also from adenoviruses that infect other species, such as bovine adenovirus (e.g. bovine adenovirus 3, BAdV3), a canine adenovirus (e.g. CAdV2), a porcine adenovirus (e.g. PAdV3 or 5), or great apes, such as Chimpanzee (Pan), Gorilla (Gorilla), Orangutan (Pongo), Bonobo (Pan paniscus) and common chimpanzee (Pan troglodytes). Typically, naturally occurring great ape adenoviruses are isolated from stool samples of the respective great ape.

[0684] Human adenoviruses may be derived from various adenovirus serotypes, for example, from human adenovirus serotypes hAd5, hAd7, hAd11, hAd26, hAd34, hAd35, hAd48, hAd49, or hAd50 (the serotypes are also referred to as Ad5, Ad7, Ad11, Ad26, Ad34, Ad35, Ad48, Ad49, or Ad50).

[0685] Great ape adenoviruses may be derived from various adenovirus serotypes, for example from great ape adenovirus serotypes GAd20, GAd19, GAd21, GAd25, GAd26, GAd27, GAd28, GAd29, GAd30, GAd31, ChAd3, ChAd4, ChAd5, ChAd6, ChAd7, ChAd8, ChAd9, ChAd10, ChAd11, ChAd16, ChAd17, ChAd19, ChAd20, ChAd22, ChAd24, ChAd26, ChAd30, ChAd31, ChAd37, ChAd38, ChAd44, ChAd55, ChAd63, ChAd73, ChAd82, ChAd83, ChAd146, ChAd147, PanAd1, PanAd2, or PanAd3.

[0686] Adenoviruses are known in the art. The sequences of most of the human and non-human adenoviruses are known, and for others can be obtained using routine procedures. An exemplary genome sequence of Ad26 is found in GenBank Accession number EF153474 and in SEQ ID NO: 1 of Int. Pat. Publ. No. WO2007/104792. An exemplary genome sequence of Ad35 is found in FIG. 6 of Int. Pat. Publ. No. WO2000/70071. Ad26 is described, for example, in Int. Pat. Publ. No. WO2007/104792. Ad35 is described, for example, in U.S. Pat. No. 7,270,811 and Int. Pat. Publ. No. WO2000/70071. ChAd3, ChAd4, ChAd5, ChAd6, ChAd7, ChAd8, ChAd9, ChAd10, ChAd11, ChAd16, ChAd17, ChAd19, ChAd20, ChAd22, ChAd24, ChAd26, ChAd30, ChAd31, ChAd37, ChAd38, ChAd44, ChAd63 and ChAd82 are described in WO2005/071093. PanAd1, PanAd2, PanAd3, ChAd55, ChAd73, ChAd83, ChAd146, and ChAd147 are described in Int. Pat. Publ. No. WO2010/086189.

[0687] Adenoviruses are engineered to comprise at least one functional deletion or a complete removal of a gene product that is essential for viral replication, such as one or more of the adenoviral regions E1, E2, and E4, therefore rendering the adenovirus to be incapable of replication. The deletion of the E1 region may comprise deletion of EIA, EIB 55K or EIB 21K, or any combination thereof. Replication deficient adenoviruses are propagated by providing the proteins encoded by the deleted region(s) in trans by the producer cell by utilizing helper plasmids or engineering the produce cell to express the required proteins. Adenoviruses may also have a deletion in the E3 region, which is dispensable for replication, and hence such a deletion does not have to be complemented. The adenovirus may comprise a functional deletion or a complete removal of the E1 region and at least part of the E3 region. The adenovirus may further comprise a functional deletion or a complete removal of the E4 region and/or the E2 region. Suitable producer cells that can be utilized are human retina cells immortalized by E1, e.g. 911 or PER.C6 cells (see, e.g., U.S. Pat. No. 5,994,128), E1-transformed amniocytes (See, e.g., EP 1230354), E1-transformed A549 cells (see e.g. Int. Pat. Publ. No. WO1998/39411, U.S. Pat. No. 5,891,690). Ad26 comprising a functional E1 coding region that is sufficient for viral replication, a deletion in the E3 coding region, and a deletion in the E4 coding region, may be used provided that E4 open reading frame 6/7 is not deleted (see e.g. U.S. Pat. No. 9,750,801).

[0688] In some embodiments, the adenovirus is a human adenovirus (Ad). In some embodiments, the Ad is derived from Ad5. In some embodiments, the Ad is derived from Ad11. In some embodiments, the Ad is derived from Ad26. In some embodiments, the Ad is derived from Ad34. In some embodiments, the Ad is derived from Ad35. In some embodiments, the Ad is derived from Ad48. In some embodiments, the Ad is derived from Ad49. In some embodiments, the Ad is derived from Ad50.

[0689] The adenovirus vector may also be a great ape adenovirus (GAd). In some embodiments, the GAd is derived from GAd20. In some embodiments, the GAd is derived from GAd19. In some embodiments, the GAd is derived from GAd21. In some embodiments, the GAd is derived from GAd25. In some embodiments, the GAd is derived from GAd26. In some embodiments, the GAd is derived from GAd27. In some embodiments, the GAd is derived from GAd28. In some embodiments, the GAd is derived from GAd29. In some embodiments, the GAd is derived from GAd30. In some embodiments, the GAd is derived from GAd31. In some embodiments, the GAd is derived from ChAd4. In some embodiments, the GAd is derived from ChAd5. In some embodiments, the GAd is derived from ChAd6. In some embodiments, the GAd is derived from ChAd7. In some embodiments, the GAd is derived from ChAd8. In some embodiments, the GAd is derived from ChAd9. In some embodiments, the GAd is derived from ChAd20. In some embodiments, the GAd is derived from ChAd22. In some embodiments, the GAd is derived from ChAd24. In some embodiments, the GAd is derived from ChAd26. In some embodiments, the GAd is derived from ChAd30. In some embodiments, the GAd is derived from ChAd31. In some embodiments, the GAd is derived from ChAd32. In some embodiments, the GAd is derived from ChAd33. In some embodiments, the GAd is derived from ChAd37. In some embodiments, the GAd is derived from ChAd38. In some embodiments, the GAd is derived from ChAd44. In some embodiments, the GAd is derived from ChAd55. In some embodiments, the GAd is derived from ChAd63. In some embodiments, the GAd is derived from ChAd68. In some embodiments, the GAd is derived from ChAd73. In some embodiments, the GAd is derived from ChAd82. In some embodiments, the GAd is derived from ChAd83.

[0690] GAd19-21 and GAd25-31 are described in Int. Pat. Publ. No. WO2019/008111 and represent strains with high immunogenicity and no pre-existing immunity in the general human population. The polynucleotide sequence of GAd20 genome is shown in SEQ ID NO: 622 as disclosed in WO2019/008111.

[0691] The disclosed polynucleotides may be inserted into a site or region (insertion region) in the virus that does not affect virus viability of the resultant recombinant virus. The polynucleotide may be inserted into the deleted E1 region in parallel (transcribed 5′ to 3′) or anti-parallel (transcribed in a 3′ to 5′ direction relative to the vector backbone) orientation. In addition, appropriate transcriptional regulatory elements that are capable of directing expression of the polypeptides in the mammalian host cells that the virus is being prepared for use may be operatively linked to the polynucleotides. “Operatively linked” sequences include both expression control sequences that are contiguous with the nucleic acid sequences that they regulate and regulatory sequences that act in trans, or at a distance to control the regulated nucleic acid sequence.

[0692] Recombinant adenoviral particles may be prepared and propagated according to any conventional technique in the field of the art (e.g., Int. Pat. Publ. No. WO1996/17070) using a complementation cell line or a helper virus, which supplies in trans the missing viral genes necessary for viral replication. The cell lines 293 (Graham et al., 1977, J. Gen. Virol. 36: 59-72), PER.C6 (see e.g. U.S. Pat. No. 5,994,128), E1 A549 and 911 are commonly used to complement E1 deletions. Other cell lines have been engineered to complement defective vectors (Yeh, et al., 1996, J. Virol. 70: 559-565; Kroughak and Graham, 1995, Human Gene Ther. 6: 1575-1586; Wang, et al., 1995, Gene Ther. 2: 775-783; Lusky, et al., 1998, J. Virol. 72: 2022-203; EP 919627 and Int. Pat. Publ. No. WO1997/04119). The adenoviral particles may be recovered from the culture supernatant but also from the cells after lysis and optionally further purified according to standard techniques (e.g., chromatography, ultracentrifugation, as described in Int. Pat. Publ. No. WO1996/27677, Int. Pat. Publ. No. WO1998/00524, Int. Pat. Publ. No. WO1998/26048 and Int. Pat. Publ. No. WO2000/50573). The construction and methods for propagating adenoviruses are also described in for example, U.S. Pat. Nos. 5,559,099, 5,837,511, 5,846,782, 5,851,806, 5,994,106, 5,994,128, 5,965,541, 5,981,225, 6,040,174, 6,020,191, and 6,113,913.

[0693] In some embodiments, the adenoviral vectors disclosed herein comprise polynucleotides encoding one or more polypeptides selected from the group consisting of SEQ ID NOs: 1, 3, 5, 7, 9, 11, 13, 15, 17, 19, 21, 23, 25, 27, 29, 31, 33, 35, 37, 39, 41, 43, 45, 47, 49, 51, 53, 55, 57, 59, 61, 63, 65, 67, 69, 71, 73, 75, 77, 79, 81, 83, 85, 87, 89, 91, 93, 95, 97, 99, 101, 103, 105, 107, 109, 111, 113, 115, 117, 119, 121, 123, 125, 127, 129, 131, 133, 135, 137, 139, 141, 143, 145, 147, 149, 151, 153, 155, 157, 159, 161, 163, 165, 167, 169, 171, 173, 175, 177, 179, 181, 183, 185, 187, 189, 191, 193, 195, 197, 199, 201, 203, 205, 207, 209, 211, 213, 215, 217, 219, 221, 223, 225, 227, 229, 231, 233, 235, 237, 239, 241, 243, 245, 247, 249, 251, 253, 255, 257, 259, 261, 263, 265, 267, 269, 271, 273, 275, 277, 279, 281, 283, 285, 287, 289, 291, 293, 295, 297, 299, 301, 303, 305, 307, 309, 311, 313, 315, 317, 319, 321, 323, 325, 327, 329, 331, 333, 335, 337, 339, 341, 343, 345, 347, 349, 351, 353, 355, 357, 359, 361, 363, 365, 367, 369, 371, 373, 375, 379, 381, 383, 385, 387, 388, 389, 390, 391, 392, 393, 394, 395, 396, 397, 398, 399, 400, 401, 402, 403, 404, 405, 406, 407, 408, 426, 427, 428, 429, 430, 431, 432, 433, 434, 435, 436, 437, 438, 439, 440, 441, 442, 443, 444, 445, 446, 447, 1001, 1003, and fragments thereof.

[0694] In some embodiments, the adenoviruses disclosed herein comprise polynucleotides encoding one or more polypeptides selected from the group consisting of SEQ ID NOs: 275, 381, 333, 337, 269, 253, 309, 325, 271, 305, 251, 245, 261, 265, 317, 255, 277, 297, 285, 437, 439, 442, 444, 379, 343, 211, 349, 213, 215, 221, 219, 225, 345, 353, 235, 223, 167, 171, 19, 23, 177, 1001, 1003, and fragments thereof. In some embodiments, the adenovirus is Ad26 and GAd20.

[0695] Poxvirus (Poxviridae) may be derived from smallpox virus (variola), vaccinia virus, cowpox virus, or monkeypox virus. Exemplary vaccinia viruses are the Copenhagen vaccinia virus (W), New York Attenuated Vaccinia Virus (NYVAC), ALVAC, TROVAC, and Modified Vaccinia Ankara (MVA).

[0696] MVA originates from the dermal vaccinia strain Ankara (Chorioallantois vaccinia Ankara (CVA) virus) that was maintained in the Vaccination Institute, Ankara, Turkey for many years and used as the basis for vaccination of humans. However, due to the often severe post-vaccinal complications associated with vaccinia viruses (VACV), there were several attempts to generate a more attenuated, safer smallpox vaccine. MVA has been generated by 516 serial passages on chicken embryo fibroblasts of the CVA virus (see Meyer et al., J. Gen. Virol., 72: 1031-1038 (1991) and U.S. Pat. No. 10,035,832). As a consequence of these long-term passages the resulting MVA virus deleted about 31 kilobases of its genomic sequence and, therefore, was described as highly host cell restricted to avian cells (Meyer, H. et al., Mapping of deletions in the genome of the highly attenuated vaccinia virus MVA and their influence on virulence, J. Gen. Virol. 72, 1031-1038, 1991; Meisinger-Henschel et al., Genomic sequence of chorioallantois vaccinia virus Ankara, the ancestor of modified vaccinia virus Ankara, J. Gen. Virol. 88, 3249-3259, 2007). Comparison of the MVA genome to its parent, CVA, revealed 6 major deletions of genomic DNA (deletion I, II, III, IV, V, and VI), totaling 31,000 basepairs. (Meyer et al., J. Gen. Virol. 72:1031-8 (1991)). It was shown in a variety of animal models that the resulting MVA was significantly avirulent (Mayr, A. & Danner, K. Vaccination against pox diseases under immunosuppressive conditions, Dev. Biol. Stand. 41: 225-34, 1978). Being that many passages were used to attenuate MVA, there are a number of different strains or isolates, depending on the passage number in CEF cells, such as MVA 476 MG/14/78, MVA-571, MVA-572, MVA-574, MVA-575 and MVA-BN. MVA 476 MG/14/78 is described for example in Int. Pat. Publ. No. WO2019/115816A1. MVA-572 strain was deposited at the European Collection of Animal Cell Cultures (“ECACC”), Health Protection Agency, Microbiology Services, Porton Down, Salisbury SP4 0JG, United Kingdom (“UK”), under the deposit number ECACC 94012707 on Jan. 27, 1994. MVA-575 strain was deposited at the ECACC under deposit number ECACC 00120707 on Dec. 7, 2000; MVA-Bavarian Nordic (“MVA-BN”) strain was deposited at the ECACC under deposit number V00080038 on Aug. 30, 2000. The genome sequences of MVA-BN and MVA-572 are available at GenBank (Accession numbers DQ983238 and DQ983237, respectively). The genome sequences of other MVA strains can be obtained using standard sequencing methods.

[0697] The disclosed viruses may be derived from any MVA strain or further derivatives of the MVA strain. A further exemplary MVA strain is deposit VR-1508, deposited at the American Type Culture collection (ATCC), Manassas, Va. 20108, USA.

[0698] “Derivatives” of MVA refer to viruses exhibiting essentially the same characteristics as the parent MVA, but exhibiting differences in one or more parts of their genomes.

[0699] In some embodiments, the MVA virus is derived from MVA 476 MG/14/78. In some embodiments, the MVA virus is derived from MVA-571. In some embodiments, the MVA virus is derived from MVA-572. In some embodiments, the MVA virus is derived from MVA-574. In some embodiments, the MVA virus is derived from MVA-575. In some embodiments, the MVA virus is derived from MVA-BN.

[0700] The disclosed polynucleotides may be inserted into a site or region (insertion region) in the MVA virus that does not affect virus viability of the resultant recombinant virus. Such regions can be readily identified by testing segments of virus DNA for regions that allow recombinant formation without seriously affecting virus viability of the recombinant virus. The thymidine kinase (TK) gene is an insertion region that may be used and is present in many viruses, such as in all examined poxvirus genomes. Additionally, MVA contains 6 natural deletion sites, each of which may be used as insertion sites (e.g. deletion I, II, III, IV, V, and VI; see e.g. U.S. Pat. Nos. 5,185,146 and 6,440,442). One or more intergenic regions (IGR) of the MVA may also be used as an insertion site, such as IGRs IGR07/08, IGR 44/45, IGR 64/65, IGR 88/89, IGR 136/137, and IGR 148/149 (see e.g. U.S. Pat. Publ. No. 2018/0064803). Additional suitable insertion sites are described in Int. Pat. Publ. No. WO2005/048957.

[0701] Recombinant poxviral particles such as rMVA are prepared as described in the art (Piccini, et al., 1987, Methods of Enzymology 153: 545-563; U.S. Pat. Nos. 4,769,330; 4,772,848; 4,603,112; 5,100,587 and 5,179,993). In an exemplary method, the DNA sequence to be inserted into the virus can be placed into an E. coli plasmid construct into which DNA homologous to a section of DNA of the MVA has been inserted. Separately, the DNA sequence to be inserted can be ligated to a promoter. The promoter-gene linkage can be positioned in the plasmid construct so that the promoter-gene linkage is flanked on both ends by DNA homologous to a DNA sequence flanking a region of MVA DNA containing a non-essential locus. The resulting plasmid construct can be amplified by propagation within E. coli bacteria and isolated. The isolated plasmid containing the DNA gene sequence to be inserted can be transfected into a cell culture, e.g., of chicken embryo fibroblasts (CEFs), at the same time the culture is infected with MVA. Recombination between homologous MVA DNA in the plasmid and the viral genome, respectively, can generate an MVA modified by the presence of foreign DNA sequences. rMVA particles may be recovered from the culture supernatant or from the cultured cells after a lysis step (e.g., chemical lysis, freezing/thawing, osmotic shock, sonication and the like). Consecutive rounds of plaque purification can be used to remove contaminating wild type virus. Viral particles can then be purified using the techniques known in the art (e.g., chromatographic methods or ultracentrifugation on cesium chloride or sucrose gradients).

[0702] In some embodiments, the MVA disclosed herein comprise polynucleotides encoding one or more polypeptides selected from the group consisting of SEQ ID NOs: 1, 3, 5, 7, 9, 11, 13, 15, 17, 19, 21, 23, 25, 27, 29, 31, 33, 35, 37, 39, 41, 43, 45, 47, 49, 51, 53, 55, 57, 59, 61, 63, 65, 67, 69, 71, 73, 75, 77, 79, 81, 83, 85, 87, 89, 91, 93, 95, 97, 99, 101, 103, 105, 107, 109, 111, 113, 115, 117, 119, 121, 123, 125, 127, 129, 131, 133, 135, 137, 139, 141, 143, 145, 147, 149, 151, 153, 155, 157, 159, 161, 163, 165, 167, 169, 171, 173, 175, 177, 179, 181, 183, 185, 187, 189, 191, 193, 195, 197, 199, 201, 203, 205, 207, 209, 211, 213, 215, 217, 219, 221, 223, 225, 227, 229, 231, 233, 235, 237, 239, 241, 243, 245, 247, 249, 251, 253, 255, 257, 259, 261, 263, 265, 267, 269, 271, 273, 275, 277, 279, 281, 283, 285, 287, 289, 291, 293, 295, 297, 299, 301, 303, 305, 307, 309, 311, 313, 315, 317, 319, 321, 323, 325, 327, 329, 331, 333, 335, 337, 339, 341, 343, 345, 347, 349, 351, 353, 355, 357, 359, 361, 363, 365, 367, 369, 371, 373, 375, 379, 381, 383, 385, 387, 388, 389, 390, 391, 392, 393, 394, 395, 396, 397, 398, 399, 400, 401, 402, 403, 404, 405, 406, 407, 408, 426, 427, 428, 429, 430, 431, 432, 433, 434, 435, 436, 437, 438, 439, 440, 441, 442, 443, 444, 445, 446, 447, 1001, 1003, and fragments thereof.

[0703] In some embodiments, the MVAs disclosed herein comprise polynucleotides encoding one or more polypeptides selected from the group consisting of SEQ ID NOs: 275, 381, 333, 337, 269, 253, 309, 325, 271, 305, 251, 245, 261, 265, 317, 255, 277, 297, 285, 437, 439, 442, 444, 379, 343, 211, 349, 213, 215, 221, 219, 225, 345, 353, 235, 223, 167, 171, 19, 23, 177, 1001, 1003, and fragments thereof.

[0704] Other suitable viruses include human adeno-associated viruses, such as AAV-2 (adeno-associated virus type 2). An attractive feature of AAVs is that they do not express any viral genes. The only viral DNA sequences included in the AAV are the 145 bp inverted terminal repeats (ITR). Thus, as in immunization with naked DNA, the only gene expressed is that of the antigen, or antigen chimera. Additionally, AAVs are known to transduce both dividing and non-dividing cells, such as human peripheral blood monocyte-derived dendritic cells, with persistent transgene expression, and with the possibility of oral and intranasal delivery for generation of mucosal immunity. Moreover, the amount of DNA required appears to be much less by several orders of magnitude, with maximum responses at doses of 10¹⁰ to 10¹¹ particles or copies of DNA in contrast to naked DNA doses of 50 μg or about 10¹⁵ copies. AAVs are packaged by co-transfection of a suitable cell line (e.g., human 293 cells) with the DNA contained in the AAV ITR chimeric protein encoding constructs and an AAV helper plasmid ACG2 containing the AAV coding region (AAV rep and cap genes) without the ITRs. The cells are subsequently infected with the adenovirus Ad5. Viruses can be purified from cell lysates using methods known in the art (e.g., such as cesium chloride density gradient ultracentrifugation) and are validated to ensure that they are free of detectable replication-competent AAV or adenovirus (e.g., by a cytopathic effect bioassay).

[0705] Retroviruses may also be used. Retroviruses are a class of integrative viruses which replicate using a virus-encoded reverse transcriptase, to replicate the viral RNA genome into double stranded DNA which is integrated into chromosomal DNA of the infected cells (e.g., target cells). Such viruses include those derived from murine leukemia viruses, especially Moloney (Gilboa, et al., 1988, Adv. Exp. Med. Biol. 241: 29) or Friend's FB29 strains (Int. Pat. Publ. No. WO1995/01447). Generally, a retrovirus is deleted of all or part of the viral genes gag, pol, and env and retains 5′ and 3′ LTRs and an encapsidation sequence. These elements may be modified to increase expression level or stability of the retrovirus. Such modifications include the replacement of the retroviral encapsidation sequence by one of a retrotransposon such as VL30 (see, e.g., U.S. Pat. No. 5,747,323). The disclosed polynucleotides may be inserted downstream of the encapsidation sequence, such as in opposite direction relative to the retroviral genome. Retroviral particles are prepared in the presence of a helper virus or in an appropriate complementation (packaging) cell line which contains integrated into its genome the retroviral genes for which the retrovirus is defective (e.g. gag/pol and env). Such cell lines are described in the prior art (Miller and Rosman, 1989, BioTechniques 7: 980; Danos and Mulligan, 1988, Proc. Natl. Acad. Sci. USA 85: 6460; Markowitz, et al., 1988, Virol. 167: 400). The product of the env gene is responsible for the binding of the viral particle to the viral receptors present on the surface of the target cell and, therefore determines the host range of the retroviral particle. Packaging cell line, such as the PA317 cells (ATCC CRL 9078) or 293E16 (WO97/35996) containing an amphotropic envelope protein may therefore be used to allow infection of human and other species' target cells. The retroviral particles are recovered from the culture supernatant and may optionally be further purified according to standard techniques (e.g. chromatography, ultracentrifugation).

[0706] Also provided are pharmaceutical compositions comprising any of the disclosed self-replicating RNA molecules or vaccines, wherein the pharmaceutical composition comprises a pharmaceutically acceptable excipient.

[0707] Provided herein are methods of inducing an immune response in a subject and methods of treating or preventing prostate cancer in a subject. The methods comprise administering any of the disclosed self-replicating RNA molecules or any of the disclosed vaccines to the subject. In some embodiments, the methods comprise administering a vector encoding the self-replicating RNA molecules. In some embodiments, the methods comprising administering a lipid/self-replicating RNA molecule complex. In some embodiments, the methods comprise administering a vaccine comprising the self-replicating RNA molecules. In some embodiments, the methods comprise administering the self-replicating RNA molecule and one or more polynucleotides or polypeptides as described herein. In some embodiments, the methods comprise administering a vaccine comprising any of the disclosed self-replicating RNA molecules and a vaccine comprising any of the disclosed recombinant viruses. Any of the compositions described herein can be used in the disclosed methods.

[0708] The methods of inducing an immune response and methods of treating or preventing prostate cancer can comprise administering a self-replicating RNA molecule, a lipid/self-replicating RNA molecule complex, or a self-replicating RNA molecule-containing vaccine, wherein the self-replicating RNA molecule comprises an RNA encoding one or more polypeptides selected from the group consisting of SEQ ID NOs: 1, 3, 5, 7, 9, 11, 13, 15, 17, 19, 21, 23, 25, 27, 29, 31, 33, 35, 37, 39, 41, 43, 45, 47, 49, 51, 53, 55, 57, 59, 61, 63, 65, 67, 69, 71, 73, 75, 77, 79, 81, 83, 85, 87, 89, 91, 93, 95, 97, 99, 101, 103, 105, 107, 109, 111, 113, 115, 117, 119, 121, 123, 125, 127, 129, 131, 133, 135, 137, 139, 141, 143, 145, 147, 149, 151, 153, 155, 157, 159, 161, 163, 165, 167, 169, 171, 173, 175, 177, 179, 181, 183, 185, 187, 189, 191, 193, 195, 197, 199, 201, 203, 205, 207, 209, 211, 213, 215, 217, 219, 221, 223, 225, 227, 229, 231, 233, 235, 237, 239, 241, 243, 245, 247, 249, 251, 253, 255, 257, 259, 261, 263, 265, 267, 269, 271, 273, 275, 277, 279, 281, 283, 285, 287, 289, 291, 293, 295, 297, 299, 301, 303, 305, 307, 309, 311, 313, 315, 317, 319, 321, 323, 325, 327, 329, 331, 333, 335, 337, 339, 341, 343, 345, 347, 349, 351, 353, 355, 357, 359, 361, 363, 365, 367, 369, 371, 373, 375, 379, 381, 383, 385, 387, 388, 389, 390, 391, 392, 393, 394, 395, 396, 397, 398, 399, 400, 401, 402, 403, 404, 405, 406, 407, 408, 426, 427, 428, 429, 430, 431, 432, 433, 434, 435, 436, 437, 438, 439, 440, 441, 442, 443, 444, 445, 446, 447, 1001, and 1003 and fragments thereof.

[0709] The methods of inducing an immune response and methods of treating or preventing prostate cancer can comprise administering a self-replicating RNA molecule, a lipid/self-replicating RNA molecule complex, or a self-replicating RNA molecule-containing vaccine, wherein the self-replicating RNA molecule comprises a RNA corresponding to one or more polynucleotides selected from the group consisting of SEQ ID NOs: 2, 4, 6, 8, 10, 12, 14, 16, 18, 20, 22, 24, 26, 28, 30, 32, 34, 36, 38, 40, 42, 44, 46, 48, 50, 52, 54, 56, 58, 60, 62, 64, 66, 68, 70, 72, 74, 76, 78, 80, 82, 84, 86, 88, 90, 92, 94, 96, 98, 100, 102, 104, 106, 108, 110, 112, 114, 116, 118, 120, 122, 124, 126, 128, 130, 132, 134, 136, 138, 140, 142, 144, 146, 148, 150, 152, 154, 156, 158, 160, 162, 164, 166, 168, 170, 172, 174, 176, 178, 180, 182, 184, 186, 188, 190, 192, 194, 196, 198, 200, 202, 204, 206, 208, 210, 212, 214, 216, 218, 220, 222, 224, 226, 228, 230, 232, 234, 236, 238, 240, 242, 244, 246, 248, 250, 252, 254, 256, 258, 260, 262, 264, 266, 268, 270, 272, 274, 276, 278, 280, 282, 284, 286, 288, 290, 292, 294, 296, 298, 300, 302, 304, 306, 308, 310, 312, 314, 316, 318, 320, 322, 324, 326, 328, 330, 332, 334, 336, 338, 340, 342, 344, 346, 348, 350, 352, 354, 356, 358, 360, 362, 364, 366, 368, 370, 372, 374, 376, 380, 382, 384, 386, 448, 449, 450, 451, 452, 453, 454, 455, 456, 457, 458, 459, 460, 461, 462, 463, 464, 465, 466, 467, 468, 469, 470, 471, 472, 473, 474, 475, 476, 477, 478, 479, 480, 481, 482, 483, 484, 485, 486, 487, 488, 489, 490, 491, 492, 493, 494, 495, 496, 497, 498, 499, 500, 501, 503, 504, 505, 506, 507, 508, 509, 510, 511, 512, 513, 514, 515, 516, 517, 519, 520, 521, 522, 523, 524, 525, 528, 529, 530, 531, 532, 533, 534, 535, 536, 537, 538, 539, 540, 1000, 1002 and fragments thereof.

[0710] The methods of inducing an immune response and methods of treating or preventing prostate cancer can comprise administering a self-replicating RNA molecule, a lipid/self-replicating RNA molecule complex, or a self-replicating RNA molecule-containing vaccine, wherein the self-replicating RNA molecule comprises an RNA encoding one or more polypeptides selected from the group consisting of SEQ ID NOs: 275, 381, 333, 337, 269, 253, 309, 325, 271, 305, 251, 245, 261, 265, 317, 255, 277, 297, 285, 437, 439, 442, 444, 379, 343, 211, 349, 213, 215, 221, 219, 225, 345, 353, 235, 223, 167, 171, 19, 23, 177, 1001, 1003 and fragments thereof.

[0711] The methods of inducing an immune response and methods of treating or preventing prostate cancer can comprise administering a self-replicating RNA molecule, a lipid/self-replicating RNA molecule complex, or a self-replicating RNA molecule-containing vaccine, wherein the self-replicating RNA molecule comprises an RNA corresponding to one or more polynucleotides selected from the group consisting of SEQ ID NOs: 276, 382, 334, 338, 270, 254, 310, 326, 272, 306, 252, 246, 262, 266, 318, 256, 278, 298, 286, 448, 450, 453, 455, 380, 344, 212, 350, 214, 216, 222, 220, 226, 346, 354, 236, 224, 168, 172, 20, 24, 178, 1000, 1002 and fragments thereof;

[0712] The methods of inducing an immune response and methods of treating or preventing prostate cancer can comprise administering a self-replicating RNA molecule, a lipid/self-replicating RNA molecule complex, or a self-replicating RNA molecule-containing vaccine, wherein the self-replicating RNA molecule comprises an RNA encoding a polypeptide of SEQ ID NOs: 541, 543, 550, 552, 554, 555, 556, 557, 558, 559, 623, or 624, 625, 626, 1004, or 1005.

[0713] The phrase “inducing an immune response” when used with reference to the methods described herein encompasses causing a desired immune response or effect in a subject in need thereof against prostate neoantigens. “Inducing an immune response” also encompasses providing a therapeutic immunity for treating against prostate neoantigens. As used herein, the term “therapeutic immunity” or “therapeutic immune response” means that the vaccinated subject is able to control the production of prostate neoantigens within a cell, for instance immunity against prostate neoantigens conferred by vaccination with prostate neoantigen vaccine. In an embodiment, “inducing an immune response” means producing an immunity in a subject in need thereof, e.g., to provide a therapeutic effect against a disease, such as prostate cancer. In certain embodiments, “inducing an immune response” refers to causing or improving cellular immunity, e.g., T cell response, against prostate neoantigens. In certain embodiments, “inducing an immune response” refers to causing or improving a humoral immune response against prostate neoantigens. In certain embodiments, “inducing an immune response” refers to causing or improving a cellular and a humoral immune response against prostate neoantigens.

[0714] As used herein, the term “protective immunity” or “protective immune response” means that the vaccinated subject is able to control the spread of a disease against which the vaccination was done. Usually, the subject having developed a “protective immune response” develops only mild to moderate clinical symptoms or no symptoms at all.

[0715] Typically, the administration of compositions of the application will have a therapeutic aim to generate an immune response against prostate neoantigens.

[0716] As used herein, “an immunogenically effective amount” or “immunologically effective amount” means an amount of a composition, polynucleotide, vector, antigen, vaccine, etc. sufficient to induce a desired immune effect or immune response in a subject in need thereof. An immunogenically effective amount can be an amount sufficient to induce an immune response in a subject in need thereof. An immunogenically effective amount can be an amount sufficient to produce immunity in a subject in need thereof, e.g., provide a therapeutic effect against a disease such as prostate cancer. An immunogenically effective amount can vary depending upon a variety of factors, such as the physical condition of the subject, age, weight, health, etc., and the particular application, e.g., providing protective immunity or therapeutic immunity. An immunogenically effective amount can readily be determined by one of ordinary skill in the art in view of the present disclosure.

[0717] An immunogenically effective amount can refer to the amount of a composition which is sufficient to achieve one, two, three, four, or more of the following effects: (i) reduce or ameliorate the severity of prostate cancer or a symptom associated therewith; (ii) reduce the duration of prostate cancer or symptom associated therewith; (iii) prevent the progression of prostate cancer or symptom associated therewith; (iv) cause regression of an prostate cancer or symptom associated therewith; (v) prevent the development or onset of prostate cancer, or symptom associated therewith; (vi) prevent the recurrence of prostate cancer or symptom associated therewith; (vii) reduce hospitalization of a subject having prostate cancer; (viii) reduce hospitalization length of a subject having prostate cancer; (ix) increase the survival of a subject with prostate cancer; (x) eliminate prostate cancer in a subject; (xi) inhibit or reduce prostate cancer proliferation in a subject; and/or (xii) enhance or improve the prophylactic or therapeutic effect(s) of another therapy.

[0718] It is expected that the immunogenically effective amount will fall in a relatively broad range that can be determined through routine trials. The RNA content of compositions will generally be expressed in terms of the amount of RNA per dose. For example, a dose can have ≤10 μg RNA, and expression can be seen at much lower levels e.g. ≤1 μg/dose, ≤100 ng/dose, ≤10 ng/dose, ≤1 ng/dose, etc.

[0719] An immunogenically effective amount can be from one vector, or from multiple vectors. As further general guidance, an immunogenically effective amount when used with reference to a peptide can range from about 10 μg to 1 mg per administration, such as 10, 20, 50, 100, 200, 300, 400, 500, 600, 700, 800, 9000, or 1000 μg per administration. An immunogenically effective amount can be administered in a single composition, or in multiple compositions, such as 1, 2, 3, 4, 5, 6, 7, 8, 9, or 10 compositions (e.g., tablets, capsules or injectables, or any composition adapted to intradermal delivery, e.g., to intradermal delivery using an intradermal delivery patch), wherein the administration of the multiple capsules or injections collectively provides a subject with an immunogenically effective amount. It is also possible to administer an immunogenically effective amount to a subject, and subsequently administer another dose of an immunogenically effective amount to the same subject, in a so-called prime-boost regimen. This general concept of a prime-boost regimen is well known to the skilled person in the vaccine field. Further booster administrations can optionally be added to the regimen, as needed.

[0720] Preferably, an immunogenically effective amount refers to the amount of a composition which is sufficient to treat prostate cancer.

[0721] In some embodiments, the methods of inducing an immune response comprises administering to the subject any of the disclosed self-replicating RNA molecules. In some embodiments, the methods of inducing an immune response comprises administering to the subject a vaccine comprising any of the disclosed self-replicating RNA molecules. The disclosed self-replicating RNA molecules, the polynucleotides, the polypeptides, the vectors, the recombinant viruses, and the vaccines can be administered to a subject by any method known in the art, including, but not limited to, parenteral administration (e.g., intramuscular, subcutaneous, intravenous, or intradermal injection), oral administration, transdermal administration, and nasal administration. In some embodiments, the administration is via parenteral (e.g., by intramuscular injection or intradermal injection) or transdermal administration.

[0722] The prostate cancer neoantigens disclosed herein can be present at a frequency of at least about 1% or more, about 2% or more, about 3% or more, about 4% or more, about 5% or more, about 6% or more, about 7% or more, about 8% or more, about 9% or more, about 10% or more, about 11% or more, about 12% or more, about 13% or more, about 14% or more, about 15% or more, about 16% or more about 17% or more, about 18% or more, about 19% or more, about 20% or more, about 21% or more, about 22% or more, about 23% or more, about 24% or more, about 25% or more, about 26% or more, about 27% or more, about 28% or more, about 29% or more, about 30% or more, about 35% or more, about 40% or more, about 45% or more, about 50% or more, about 55% or more, about 60% or more, about 65% or more, or about 70% or more in a population of subjects having the prostate cancer.

[0723] Also provided is the use of any of the disclosed vaccines for the preparation of a medicament for treating or preventing a prostate cancer.

[0724] Also provided is the use of any of the disclosed vaccines for the preparation of a pharmaceutical composition for treating or preventing a prostate cancer.

[0725] Also provided is any of the disclosed vaccines for use in treating or preventing a prostate cancer.

[0726] Also provided are methods of treating or preventing a prostate cancer in a subject, comprising administering to the subject a therapeutically effective amount of one or more of the disclosed pharmaceutical compositions.

[0727] “Prostate cancer” is meant to include all types of cancerous growths within prostate or oncogenic processes, metastatic tissues or malignantly transformed cells, tissues, or organs, irrespective of histopathology type or stage of invasiveness. In some embodiments, the prostate cancer is an adenocarcinoma. In some aspects, the prostate cancer is a localized prostate adenocarcinoma. In some embodiments, the prostate cancer is a metastatic prostate cancer. In some embodiments, the prostate cancer has metastasized to rectum, lymph node or bone, or any combination thereof. In some embodiments, the prostate cancer is a relapsed or a refractory prostate cancer. In some embodiments, the prostate cancer is a castration resistant prostate cancer. In some embodiments, the prostate cancer is sensitive to an androgen deprivation therapy. In some embodiments, the prostate cancer is insensitive to the androgen deprivation therapy. In some embodiments, the subject is treatment naïve. In some embodiments, the subject has received androgen deprivation therapy.

[0728] In some embodiments, the subject has an elevated level of prostate specific antigen (PSA). PSA is elevated in a subject when the level is typically about ≥4.0 ng/mL. In some instances, elevated PSA may refer to level off ≥3.0 ng/mL. PSA levels may also be compared to post-androgen deprivation therapy levels.

[0729] Androgen deprivation therapies include abiraterone, ketoconazole, enzalutamide, galeterone, ARN-509 and orteronel (TAK-700), or prostatectomy.

[0730] In some embodiments, the self-replicating RNA molecules are administered as part of a “prime-boost” regimen. In some embodiments, the self-replicating RNA molecule is a primer vaccine used for priming an immune response. In some embodiments, the self-replicating RNA molecule is a booster vaccine used for boosting an immune response. This general concept of a prime-boost regimen is well known to the skilled person in the vaccine field. Any of the vaccines and compositions described herein can be used as priming and/or boosting vaccines for priming and/or boosting an immune response against prostate neoantigens.

[0731] In some embodiments, the primer vaccine can be re-administered for boosting immunization. Further booster administrations can optionally be added to the regimen, as needed. An adjuvant can be present in the booster vaccine, present in a separate composition to be administered together with the booster vaccine, or administered on its own as the boosting immunization.

[0732] An illustrative and non-limiting example of a prime-boost regimen includes administering a single dose of an immunogenically effective amount of a composition to a subject to prime the immune response; and subsequently administering another dose of an immunogenically effective amount of a composition to boost the immune response, wherein the boosting immunization is first administered about two to six weeks, preferably four weeks after the priming immunization is initially administered. Optionally, about 10 to 14 weeks, preferably 12 weeks, after the priming immunization is initially administered, a further boosting immunization of the composition or other adjuvant, is administered.

[0733] The disclosed self-replicating RNA molecules can be administered in a prime-boost regimen with one or more polynucleotides, one or more polypeptides, or one or more vaccines comprising:
[0734] a). one or more polynucleotides selected from the group consisting of SEQ ID NOs: 2, 4, 6, 8, 10, 12, 14, 16, 18, 20, 22, 24, 26, 28, 30, 32, 34, 36, 38, 40, 42, 44, 46, 48, 50, 52, 54, 56, 58, 60, 62, 64, 66, 68, 70, 72, 74, 76, 78, 80, 82, 84, 86, 88, 90, 92, 94, 96, 98, 100, 102, 104, 106, 108, 110, 112, 114, 116, 118, 120, 122, 124, 126, 128, 130, 132, 134, 136, 138, 140, 142, 144, 146, 148, 150, 152, 154, 156, 158, 160, 162, 164, 166, 168, 170, 172, 174, 176, 178, 180, 182, 184, 186, 188, 190, 192, 194, 196, 198, 200, 202, 204, 206, 208, 210, 212, 214, 216, 218, 220, 222, 224, 226, 228, 230, 232, 234, 236, 238, 240, 242, 244, 246, 248, 250, 252, 254, 256, 258, 260, 262, 264, 266, 268, 270, 272, 274, 276, 278, 280, 282, 284, 286, 288, 290, 292, 294, 296, 298, 300, 302, 304, 306, 308, 310, 312, 314, 316, 318, 320, 322, 324, 326, 328, 330, 332, 334, 336, 338, 340, 342, 344, 346, 348, 350, 352, 354, 356, 358, 360, 362, 364, 366, 368, 370, 372, 374, 376, 380, 382, 384, 386, 448, 449, 450, 451, 452, 453, 454, 455, 456, 457, 458, 459, 460, 461, 462, 463, 464, 465, 466, 467, 468, 469, 470, 471, 472, 473, 474, 475, 476, 477, 478, 479, 480, 481, 482, 483, 484, 485, 486, 487, 488, 489, 490, 491, 492, 493, 494, 495, 496, 497, 498, 499, 500, 501, 503, 504, 505, 506, 507, 508, 509, 510, 511, 512, 513, 514, 515, 516, 517, 519, 520, 521, 522, 523, 524, 525, 528, 529, 530, 531, 532, 533, 534, 535, 536, 537, 538, 539, 540, 1000, 1002, and fragments of the preceding sequences;
[0735] b). one or more polynucleotides selected from the group consisting of SEQ ID NOs: 276, 382, 334, 338, 270, 254, 310, 326, 272, 306, 252, 246, 262, 266, 318, 256, 278, 298, 286, 448, 450, 453, 455, 380, 344, 212, 350, 214, 216, 222, 220, 226, 346, 354, 236, 224, 168, 172, 20, 24, 178, 1000, 1002, and fragments thereof;
[0736] c). one or more polynucleotides selected from the group consisting of SEQ ID NOs: 459, 460, 461, 462, 463, 464, 465, 466, 467, 468, 469, 470, 471, 472, 473, 474, 475, 476, 477, 478, 479, 480, 481, 482, 483, 484, 485, 486, 487, 488, 489, 490, 491, 492, 493, 494, 495, 496, 497, 498, 499, and fragments thereof;
[0737] d). one or more polynucleotides selected from the group consisting of SEQ ID NOs: 500, 501, 461, 503, 504, 505, 506, 507, 508, 509, 510, 511, 512, 513, 514, 515, 516, 517, 477, 519, 520, 521, 522, 523, 524, 525, 485, 486, 528, 529, 530, 531, 532, 533, 534, 535, 536, 537, 538, 539, 540 and fragments thereof;
[0738] e). a polynucleotide sequence of SEQ ID NOs: 542, 551, 544, or 553;
[0739] f). a polynucleotide encoding one or more polypeptides selected from the group consisting of SEQ ID NOs: 1, 3, 5, 7, 9, 11, 13, 15, 17, 19, 21, 23, 25, 27, 29, 31, 33, 35, 37, 39, 41, 43, 45, 47, 49, 51, 53, 55, 57, 59, 61, 63, 65, 67, 69, 71, 73, 75, 77, 79, 81, 83, 85, 87, 89, 91, 93, 95, 97, 99, 101, 103, 105, 107, 109, 111, 113, 115, 117, 119, 121, 123, 125, 127, 129, 131, 133, 135, 137, 139, 141, 143, 145, 147, 149, 151, 153, 155, 157, 159, 161, 163, 165, 167, 169, 171, 173, 175, 177, 179, 181, 183, 185, 187, 189, 191, 193, 195, 197, 199, 201, 203, 205, 207, 209, 211, 213, 215, 217, 219, 221, 223, 225, 227, 229, 231, 233, 235, 237, 239, 241, 243, 245, 247, 249, 251, 253, 255, 257, 259, 261, 263, 265, 267, 269, 271, 273, 275, 277, 279, 281, 283, 285, 287, 289, 291, 293, 295, 297, 299, 301, 303, 305, 307, 309, 311, 313, 315, 317, 319, 321, 323, 325, 327, 329, 331, 333, 335, 337, 339, 341, 343, 345, 347, 349, 351, 353, 355, 357, 359, 361, 363, 365, 367, 369, 371, 373, 375, 379, 381, 383, 385, 387, 388, 389, 390, 391, 392, 393, 394, 395, 396, 397, 398, 399, 400, 401, 402, 403, 404, 405, 406, 407, 408, 426, 427, 428, 429, 430, 431, 432, 433, 434, 435, 436, 437, 438, 439, 440, 441, 442, 443, 444, 445, 446, 447, 1001, and 1003, and fragments of the preceding sequences;
[0740] g). a polynucleotide encoding one or more polypeptides selected from the group consisting of SEQ ID NOs: 275, 381, 333, 337, 269, 253, 309, 325, 271, 305, 251, 245, 261, 265, 317, 255, 277, 297, 285, 437, 439, 442, 444, 379, 343, 211, 349, 213, 215, 221, 219, 225, 345, 353, 235, 223, 167, 171, 19, 23, 177, 1001, 1003, and fragments thereof;
[0741] h). a polynucleotide encoding a polypeptide of any one of SEQ ID NOs: 541, 550, 554, 555, 556, 623, 624, 543, 552, 557, 558, 559, 625, or 626;
[0742] i). one or more polypeptides selected from the group consisting of SEQ ID NOs: 1, 3, 5, 7, 9, 11, 13, 15, 17, 19, 21, 23, 25, 27, 29, 31, 33, 35, 37, 39, 41, 43, 45, 47, 49, 51, 53, 55, 57, 59, 61, 63, 65, 67, 69, 71, 73, 75, 77, 79, 81, 83, 85, 87, 89, 91, 93, 95, 97, 99, 101, 103, 105, 107, 109, 111, 113, 115, 117, 119, 121, 123, 125, 127, 129, 131, 133, 135, 137, 139, 141, 143, 145, 147, 149, 151, 153, 155, 157, 159, 161, 163, 165, 167, 169, 171, 173, 175, 177, 179, 181, 183, 185, 187, 189, 191, 193, 195, 197, 199, 201, 203, 205, 207, 209, 211, 213, 215, 217, 219, 221, 223, 225, 227, 229, 231, 233, 235, 237, 239, 241, 243, 245, 247, 249, 251, 253, 255, 257, 259, 261, 263, 265, 267, 269, 271, 273, 275, 277, 279, 281, 283, 285, 287, 289, 291, 293, 295, 297, 299, 301, 303, 305, 307, 309, 311, 313, 315, 317, 319, 321, 323, 325, 327, 329, 331, 333, 335, 337, 339, 341, 343, 345, 347, 349, 351, 353, 355, 357, 359, 361, 363, 365, 367, 369, 371, 373, 375, 379, 381, 383, 385, 387, 388, 389, 390, 391, 392, 393, 394, 395, 396, 397, 398, 399, 400, 401, 402, 403, 404, 405, 406, 407, 408, 426, 427, 428, 429, 430, 431, 432, 433, 434, 435, 436, 437, 438, 439, 440, 441, 442, 443, 444, 445, 446, 447, 1001, and 1003, and fragments of the preceding sequences;
[0743] j). one or more polypeptides selected from the group consisting of SEQ ID NOs: 275, 381, 333, 337, 269, 253, 309, 325, 271, 305, 251, 245, 261, 265, 317, 255, 277, 297, 285, 437, 439, 442, 444, 379, 343, 211, 349, 213, 215, 221, 219, 225, 345, 353, 235, 223, 167, 171, 19, 23, 177, 1001, 1003, and fragments thereof;
[0744] k). a polypeptide comprising the amino acid sequence of any one of SEQ ID NOs: 541, 550, 554, 555, 556, 623, 624, 543, 552, 557, 558, 559, 625, or 626; or
[0745] l). a vaccine comprising any of the above polynucleotides or polypeptides.

[0746] The disclosed polynucleotides and polypeptides can be attached to nanoparticles for delivery to a subject. Delivery of the polypeptides or fragments thereof, the polynucleotides encoding them or the vectors comprising the polynucleotides using nanoparticles may eliminate the need to include a virus or an adjuvant in the vaccine composition. The polynucleotide may be DNA or RNA. The nanoparticles may contain immune danger signals that help to effectively induce an immune response to the peptides. The nanoparticles may induce dendritic cell (DC) activation and maturation, required for a robust immune response. The nanoparticles may contain non-self components that improve uptake of the nanoparticles and thus the peptides by cells, such as antigen presenting cells.

[0747] The nanoparticles are typically from about 1 nm to about 100 nm in diameter, such as about 20 nm to about 40 nm. Nanoparticles with a mean diameter of 20 to 40 nm may facilitate uptake of the nanoparticle to the cytosol (see. e.g. WO2019/135086). Exemplary nanoparticles are polymeric nanoparticles, inorganic nanoparticles, liposomes, lipid nanoparticles (LNP), an immune stimulating complex (ISCOM), a virus-like particle (VLP), or a self-assembling protein. The nanoparticles may be calcium phosphate nanoparticles, silicon nanoparticles or gold nanoparticles. The polymeric nanoparticles may comprise one or more synthetic polymers, such as poly(d,l-lactide-co-glycolide) (PLG), poly(d,l-lactic-coglycolic acid) (PLGA), poly(g-glutamic acid) (g-PGA)m poly(ethylene glycol) (PEG), or polystyrene or one or more natural polymers such as a polysaccharide, for example pullulan, alginate, inulin, and chitosan. The use of a polymeric nanoparticles may be advantageous due to the properties of the polymers that may be include in the nanoparticle. For instance, the natural and synthetic polymers recited above may have good biocompatibility and biodegradability, a non-toxic nature and/or the ability to be manipulated into desired shapes and sizes. The polymeric nanoparticle may also form hydrogel nanoparticles, hydrophilic three-dimensional polymer networks with favorable properties including flexible mesh size, large surface area for multivalent conjugation, high water content, and high loading capacity for antigens. Polymers such as Poly(L-lactic acid) (PLA), PLGA, PEG, and polysaccharides are suitable for forming hydrogel nanoparticles. Inorganic nanoparticles typically have a rigid structure and comprise a shell in which an antigen is encapsulated or a core to which the antigen may be covalently attached. The core may comprise one or more atoms such as gold (Au), silver (Ag), copper (Cu) atoms, Au/Ag, Au/Cu, Au/Ag/Cu, Au/Pt, Au/Pd or Au/Ag/Cu/Pd or calcium phosphate (CaP).

[0748] The nanoparticles may be liposomes. Liposomes are typically formed from biodegradable, non-toxic phospholipids and comprise a self-assembling phospholipid bilayer shell with an aqueous core. Liposomes may be an unilamellar vesicle comprising a single phospholipid bilayer, or a multilamellar vesicle that comprises several concentric phospholipid shells separated by layers of water. As a consequence, liposomes may be tailored to incorporate either hydrophilic molecules into the aqueous core or hydrophobic molecules within the phospholipid bilayers. Liposomes may encapsulate antigens such as the disclosed polypeptides or fragments thereof within the core for delivery. Liposomes and liposomal formulations can be prepared according to standard methods and are well known in the art, see, e.g., Remington's; Akimaru, 1995, Cytokines Mol. Ther. 1: 197-210; Alving, 1995, Immunol. Rev. 145: 5-31; Szoka, 1980, Ann. Rev. Biophys. Bioeng. 9: 467; U.S. Pat. Nos. 4,235,871; 4,501,728; and 4,837,028. The liposomes may comprise a targeting molecule for targeting liposome complexes to a particular cell type. Targeting molecule may comprise a binding partner (e.g., a ligand or receptor) for a biomolecule (e.g., a receptor or ligand) on the surface of a blood vessel or a cell found in a target tissue. Liposome charge is an important determinant in liposome clearance from the blood, with negatively charged liposomes being taken up more rapidly by the reticuloendothelial system (Juliano, 1975, Biochem. Biophys. Res. Commun. 63: 651) and thus having shorter half-lives in the bloodstream. Incorporating phosphatidylethanolamine derivatives enhances the circulation time by preventing liposomal aggregation. For example, incorporation of N-(omega-carboxy)acylamidophosphatidylethanolamines into large unilamellar vesicles of L-alpha-distearoylphosphatidylcholine dramatically increases the in vivo liposomal circulation lifetime (see, e.g., Ahl, 1997, Biochim. Biophys. Acta 1329: 370-382). Typically, liposomes are prepared with about 5 to 15 mole percent negatively charged phospholipids, such as phosphatidylglycerol, phosphatidylserine, or phosphatidyl-inositol. Added negatively charged phospholipids, such as phosphatidylglycerol, also serve to prevent spontaneous liposome aggregation, and thus minimize the risk of undersized liposomal aggregate formation. Membrane-rigidifying agents, such as sphingomyelin or a saturated neutral phospholipid, at a concentration of at least about 50 mole percent, and 5 to 15 mole percent of monosialylganglioside can also impart desirably liposome properties, such as rigidity (see, e.g., U.S. Pat. No. 4,837,028). Additionally, the liposome suspension can include lipid-protective agents which protect lipids against free-radical and lipid-peroxidative damages on storage. Lipophilic free-radical quenchers, such as alpha-tocopherol and water-soluble iron-specific chelators, such as ferrioxianine, are preferred.

[0749] The nanoparticles may be lipid nanoparticles (LNP). LNPs are similar to liposomes but have slightly different function and composition. LNPs are designed toward encapsulating polynucleotides, such as DNA, mRNA, siRNA and sRNA. Traditional liposomes contain an aqueous core surrounded by one or more lipid bilayers. LNPs may assume a micelle-like structure, encapsulating drug molecules in a non-aqueous core. LNPs typically contain a cationic lipid, a non-cationic lipid, and a lipid that prevents aggregation of the particle (e.g., a PEG-lipid conjugate). LNPs are useful for systemic applications, as they exhibit extended circulation lifetimes following intravenous (i.e.) injection and accumulate at distal sites (e.g., sites physically separated from the administration site). The LNPs may have a mean diameter of about 50 nm to about 150 nm, such as about 60 nm to about 130 nm, or about 70 nm to about 110 nm, or about 70 nm to about 90 nm, and are substantially nontoxic. Preparation of polynucleotide loaded LNPs are disclosed in, e.g., U.S. Pat. Nos. 5,976,567; 5,981,501; 6,534,484; 6,586,410; 6,815,432; and PCT Publication No. WO 96/40964. Polynucleotide containing LNPs are described for example in WO2019/191780.

[0750] The nanoparticles can include multilamellar vesicles of heterogeneous sizes. For example, vesicle-forming lipids can be dissolved in a suitable organic solvent or solvent system and dried under vacuum or an inert gas to form a thin lipid film. If desired, the film can be redissolved in a suitable solvent, such as tertiary butanol, and then lyophilized to form a more homogeneous lipid mixture which is in a more easily hydrated powder like form. This film is covered with an aqueous solution of the polypeptide complex and allowed to hydrate, typically over a 15 to 60 minute period with agitation. The size distribution of the resulting multilamellar vesicles can be shifted toward smaller sizes by hydrating the lipids under more vigorous agitation conditions or by adding solubilizing detergents such as deoxycholate. The hydration medium may comprise the nucleic acid at a concentration which is desired in the interior volume of the liposomes in the final liposome suspension. Suitable lipids that may be used to form multilamellar vesicles include DOTMA (Feigner, et al., 1987, Proc. Natl. Acad. Sci. USA 84: 7413-7417), DOGS or Transfectain™ (Behr, et al., 1989, Proc. Natl. Acad. Sci. USA 86: 6982-6986), DNERIE or DORIE (Feigner, et al., Methods 5: 67-75), DC-CHOL (Gao and Huang, 1991, BBRC 179: 280-285), DOTAP™ (McLachlan, et al., 1995, Gene Therapy 2: 674-622), Lipofectamine™, and glycerolipid compounds (see, e.g., EP901463 and WO98/37916).

[0751] The nanoparticle may be an immune-stimulating complex (ISCOM). ISCOMs are cage-like particles which are typically formed from colloidal saponin-containing micelles. ISCOMs may comprise cholesterol, phospholipid (such as phosphatidylethanolamine or phosphatidylcholine) and saponin (such as Quil A from the tree Quillaia saponaria).

[0752] The nanoparticle may be a virus-like particle (VLP). VLPs are self-assembling nanoparticles that lack infectious nucleic acid, which are formed by self-assembly of biocompatible capsid protein. VLPs are typically about 20 to about 150 nm, such as about 20 to about 40 nm, about 30 to about 140 nm, about 40 to about 130 nm, about 50 to about 120 nm, about 60 to about 110 nm, about 70 to about 100 nm, or about 80 to about 90 nm in diameter. VLPs advantageously harness the power of evolved viral structure, which is naturally optimized for interaction with the immune system. The naturally-optimized nanoparticle size and repetitive structural order means that VLPs induce potent immune responses, even in the absence of adjuvant.

[0753] The nanoparticles may contain replicons that encode the polypeptides of the disclosure. The replicons may be DNA or RNA.

[0754] The methods of inducing an immune response or treating or preventing prostate cancer in a subject can comprise administering to the subject a therapeutically effective amount of a first vaccine comprising any of the disclosed self-replicating RNA molecules for priming the immune response (“prime vaccine”), and administering to the subject a therapeutically effective amount of a second vaccine comprising a MVA for boosting the immune response (“boost vaccine”), thereby inducing an immune response, treating the prostate cancer, or preventing the prostate cancer in the subject.

[0755] The methods of inducing an immune response or treating or preventing prostate cancer in a subject can comprise administering to the subject a therapeutically effective amount of a first vaccine comprising any of the disclosed self-replicating RNA molecules for priming the immune response (“prime vaccine”), and administering to the subject a therapeutically effective amount of a second vaccine comprising a Ad26 for boosting the immune response (“boost vaccine”), thereby inducing an immune response, treating the prostate cancer, or preventing the prostate cancer in the subject.

[0756] The methods of inducing an immune response or treating or preventing prostate cancer in a subject can comprise administering to the subject a therapeutically effective amount of a first vaccine comprising any of the disclosed self-replicating RNA molecules for priming the immune response (“prime vaccine”), and administering to the subject a therapeutically effective amount of a second vaccine comprising a GAd for boosting the immune response (“boost vaccine”), thereby inducing an immune response, treating the prostate cancer, or preventing the prostate cancer in the subject.

[0757] The methods of inducing an immune response or treating or preventing prostate cancer in a subject can comprise administering to the subject a therapeutically effective amount of a first vaccine comprising a MVA for priming the immune response (“prime vaccine”), and administering to the subject a therapeutically effective amount of a second vaccine comprising any of the disclosed self-replicating RNA molecules for boosting the immune response (“boost vaccine”), thereby inducing an immune response, treating the prostate cancer, or preventing the prostate cancer in the subject.

[0758] The methods of inducing an immune response or treating or preventing prostate cancer in a subject can comprise administering to the subject a therapeutically effective amount of a first vaccine comprising a Ad26 for priming the immune response (“prime vaccine”), and administering to the subject a therapeutically effective amount of a second vaccine comprising any of the disclosed self-replicating RNA molecules for boosting the immune response (“boost vaccine”), thereby inducing an immune response, treating the prostate cancer, or preventing the prostate cancer in the subject.

[0759] The methods of inducing an immune response or treating or preventing prostate cancer in a subject can comprise administering to the subject a therapeutically effective amount of a first vaccine comprising a GAd for priming the immune response (“prime vaccine”), and administering to the subject a therapeutically effective amount of a second vaccine comprising any of the disclosed self-replicating RNA molecules for boosting the immune response (“boost vaccine”), thereby inducing an immune response, treating the prostate cancer, or preventing the prostate cancer in the subject.

[0760] The methods of inducing an immune response, treating the prostate cancer, or preventing the prostate cancer in a subject can comprise administering to the subject
[0761] a) a first vaccine (“prime vaccine”) comprising a polynucleotide or RNA encoding one or more polypeptides selected from the group consisting of SEQ ID NOs: 275, 381, 333, 337, 269, 253, 309, 325, 271, 305, 251, 245, 261, 265, 317, 255, 277, 297, 285, 437, 439, 442, 444, 379, 343, 211, 349, 213, 215, 221, 219, 225, 345, 353, 235, 223, 167, 171, 19, 23, 177, 1001 and 1003; and
[0762] b) a second vaccine (“boost vaccine”) comprising a polynucleotide or RNA encoding one or more polypeptides selected from the group consisting of SEQ ID NOs: 275, 381, 333, 337, 269, 253, 309, 325, 271, 305, 251, 245, 261, 265, 317, 255, 277, 297, 285, 437, 439, 442, 444, 379, 343, 211, 349, 213, 215, 221, 219, 225, 345, 353, 235, 223, 167, 171, 19, 23, 177, 1001 and 1003.

[0763] The methods of inducing an immune response, treating the prostate cancer, or preventing the prostate cancer in a subject can comprise administering to the subject
[0764] a) a first vaccine (“prime vaccine”) comprising a polynucleotide or RNA encoding a polypeptide selected from the group consisting of SEQ ID NOs: 541, 543, 550, 552, 554, 555, 556, 557, 558, 559, 623, 624, 625, 626, 1004, or 1005 and
[0765] b) a second vaccine (“boost vaccine”) comprising a polynucleotide or RNA encoding a polypeptide selected from the group consisting of SEQ ID NOs: 541, 543, 550, 552, 554, 555, 556, 557, 558, 559, 623, 624, 625, 626, 1004, or 1005.

[0766] The first vaccine (“prime vaccine”) and the second vaccine (“boost vaccine”) can be distinct recombinant viruses derived from GAd20, MVA, Ad26, or a self-replicating RNA molecule.

[0767] The first vaccine and the second vaccine can be capable of eliciting a cellular immune response in the subject. In some embodiments, the cellular immune response is specific against one or more fragments of the polypeptide of SEQ ID NOs: 275, 381, 333, 337, 269, 253, 309, 325, 271, 305, 251, 245, 261, 265, 317, 255, 277, 297, 285, 437, 439, 442, 444, 379, 343, 211, 349, 213, 215, 221, 219, 225, 345, 353, 235, 223, 167, 171, 19, 23, 177, 1001, or 1003 or any combination thereof. In some embodiments, the cellular immune response is specific against one or more fragments of the polypeptide of SEQ ID NOs: 541, 543, 550, 552, 554, 555, 556, 557, 558, 559, 623, 624, 625, 626, 1004, or 1005.

[0768] The cellular immune response can comprise activation of vaccine-specific CD8⁺ T cells, CD4⁺ T cells, or CD8⁺ T cells and CD4⁺ T cells, wherein activation is assessed by increased production of TNFα, IFNγ, or TNFα and IFNγ by CD8⁺ T cells, CD4⁺ T cells, or CD8⁺ T cells and CD4⁺ T cells.

[0769] The first vaccine (“prime vaccine”), the second vaccine (“boost vaccine”), or both the first vaccine (“prime vaccine”) and the second vaccine (“boost vaccine”) can be an RNA vaccine.

[0770] The first vaccine (“prime vaccine”), the second vaccine (“boost vaccine”), or both the first vaccine (“prime vaccine”) and the second vaccine (“boost vaccine”) can be a self-replicating RNA molecule.

[0771] The first vaccine (“prime vaccine”) can be a recombinant virus derived from GAd20, Ad26 or MVA and the second vaccine (“boost vaccine”) can be a self-replicating RNA molecule. In some embodiments, the first vaccine is Ad26. In some embodiments, the first vaccine is GAd20. In some embodiments, the first vaccine is MVA.

[0772] The first vaccine (“prime vaccine”) can be a self-replicating RNA molecule and the second vaccine (“boost vaccine”) can be a recombinant virus derived from Ad26, GAd20 or MVA. In some embodiments, the second vaccine is Ad26. In some embodiments, the second vaccine is GAd20. In some embodiments, the second vaccine is MVA.

[0773] The first vaccine (“prime vaccine”) can be a recombinant virus derived from Ad26 comprising a polynucleotide encoding a polypeptide of SEQ ID NOs: 543, 552, 557, 558, 559, 625, 626, 1004 or 1005 and the second vaccine (“boost vaccine”) can be a self-replicating RNA molecule comprising a polynucleotide encoding a polypeptide of SEQ ID NOs 541, 543, 550, 552, 554, 555, 556, 557, 558, 559, 623, 624, 625, 626, 1004 or 1005.

[0774] The first vaccine (“prime vaccine”) can be a recombinant virus derived from GAd20 comprising a polynucleotide encoding a polypeptide of SEQ ID NOs: 541, 550, 554, 555, 556, 623, 624, 1004 or 1005 and the second vaccine (“boost vaccine”) can be a self-replicating RNA molecule comprising a polynucleotide encoding a polypeptide of SEQ ID NOs 541, 543, 550, 552, 554, 555, 556, 557, 558, 559, 623, 624, 625, 626, 1004 or 1005.

[0775] The first vaccine (“prime vaccine”) can be a recombinant virus derived from MVA comprising a polynucleotide encoding a polypeptide of SEQ ID NOs: 543, 552, 557, 558, 559, 625, 626, 1004 or 1005 and the second vaccine (“boost vaccine”) can be a self-replicating RNA molecule comprising a polynucleotide encoding a polypeptide of SEQ ID NOs 541, 543, 550, 552, 554, 555, 556, 557, 558, 559, 623, 624, 625, 626, 1004 or 1005.

[0776] The first vaccine (“prime vaccine”) can be a self-replicating RNA molecule comprising a polynucleotide encoding a polypeptide of SEQ ID NOs 541, 543, 550, 552, 554, 555, 556, 557, 558, 559, 623, 624, 625, 626, 1004 or 1005 and the second vaccine (“boost vaccine”) can be a recombinant virus derived from Ad26 comprising a polynucleotide encoding a polypeptide of SEQ ID NOs: 543, 552, 557, 558, 559, 625, 626, 1004 or 1005.

[0777] The first vaccine (“prime vaccine”) can be a self-replicating RNA molecule comprising a polynucleotide encoding a polypeptide of SEQ ID NOs 541, 543, 550, 552, 554, 555, 556, 557, 558, 559, 623, 624, 625, 626, 1004 or 1005 and the second vaccine (“boost vaccine”) can be a recombinant virus derived from GAd20 comprising a polynucleotide encoding a polypeptide of SEQ ID NOs: 541, 550, 554, 555, 556, 623, 624, 1004 or 1005.

[0778] The first vaccine (“prime vaccine”) can be a self-replicating RNA molecule comprising a polynucleotide encoding a polypeptide of SEQ ID NOs 541, 543, 550, 552, 554, 555, 556, 557, 558, 559, 623, 624, 625, 626, 1004 or 1005 and the second vaccine (“boost vaccine”) can be a recombinant virus derived from MVA comprising a polynucleotide encoding a polypeptide of SEQ ID NOs: 543, 552, 557, 558, 559, 625, 626, 1004 or 1005.

[0779] The self-replicating RNA molecule can be an alphavirus. In some embodiments, the alphavirus is derived from Eastern equine encephalitis virus (EEEV), Venezuelan equine encephalitis virus (VEEV), Everglades virus (EVEV), Mucambo virus (MUCV), Semliki forest virus (SFV), Pixuna virus (PIXV), Middleburg virus (MIDV), Chikungunya virus (CHIKV), O'Nyong-Nyong virus (ONNV), Ross River virus (RRV), Barmah Forest virus (BF), Getah virus (GET), Sagiyama virus (SAGV), Bebaru virus (BEBV), Mayaro virus (MAYV), Una virus (UNAV), Sindbis virus (SINV), Aura virus (AURAV), Whataroa virus (WHAV), Babanki virus (BABV), Kyzylagach virus (KYZV), Western equine encephalitis virus (WEEV), Highland J virus (HJV), Fort Morgan virus (FMV), Ndumu (NDUV), and Buggy Creek virus. Virulent and avirulent alphavirus strains are both suitable. In some embodiments, the alphavirus RNA replicon is of a Sindbis virus (SIN), a Semliki Forest virus (SFV), a Ross River virus (RRV), a Venezuelan equine encephalitis virus (VEEV), or an Eastern equine encephalitis virus (EEEV). In some embodiments, the alphavirus is a Venezuelan equine encephalitis virus (VEEV).

[0780] The subject can have, can be suspected of having, or can be suspected to develop prostate cancer. In some embodiments, the prostate cancer is a relapsed prostate cancer, a refractory prostate cancer, a metastatic prostate cancer or a castration resistant prostate cancer, or any combination thereof. In some embodiments, the subject is treatment naïve. In some embodiments, the subject has received androgen deprivation therapy. In some embodiments, the subject has an elevated level of PSA.

[0781] The methods of inducing an immune response or treating or preventing prostate cancer in a subject can further comprise administering an additional cancer therapeutic agent to the subject. Suitable additional cancer therapeutic agents include a chemotherapy, an androgen deprivation therapy, radiation, a checkpoint inhibitor, a targeted therapy, or any combination thereof. The methods of treating and preventing prostate cancer in a subject can further comprise a surgery. In some embodiments, the additional cancer therapeutic agent is a CTLA-4 antibody, a CTLA4 ligand, a PD-1 axis inhibitor, a PD-L1 axis inhibitor, a TLR agonist, a CD40 agonist, an OX40 agonist, hydroxyurea, ruxolitinib, fedratinib, a 41BB agonist, a CD28 agonist, a STING antagonist, a RIG-1 antagonist, TCR-T therapy, CAR-T therapy, FLT3 ligand, aluminum sulfate, BTK inhibitor, CD38 antibody, CDK inhibitor, CD33 antibody, CD37 antibody, CD25 antibody, GM-CSF inhibitor, IL-2, IL-15, IL-7, CD3 redirection molecules, pomalimib, IFNγ, IFNα, TNFα, VEGF antibody, CD70 antibody, CD27 antibody, BCMA antibody or GPRC5D antibody or any combination thereof.

[0782] The checkpoint inhibitor can be ipilimumab, cetrelimab, pembrolizumab, nivolumab, sintilimab, cemiplimab, toripalimab, camrelizumab, tislelizumab, dostralimab, spartalizumab, prolgolimab, balstilimab, budigalimab, sasanlimab, avelumab, atezolizumab, durvalumab, envafolimab, or iodapolimab, or any combination thereof.

[0783] The first vaccine (“prime vaccine”) can be administered one or more times to the subject. The second vaccine (“boost vaccine”) can be administered one or more times to the subject. In some embodiments, the first vaccine is administered between about 1-16 weeks prior to administering the second vaccine. In some embodiments, the first vaccine is administered about 1 week prior to administering the second vaccine. In some embodiments, the first vaccine is administered about 2 weeks prior to administering the second vaccine. In some embodiments, the first vaccine is administered about 3 weeks prior to administering the second vaccine. In some embodiments, the first vaccine is administered about 4 weeks prior to administering the second vaccine. In some embodiments, the first vaccine is administered about 5 weeks prior to administering the second vaccine. In some embodiments, the first vaccine is administered about 6 weeks prior to administering the second vaccine. In some embodiments, the first vaccine is administered about 7 weeks prior to administering the second vaccine. In some embodiments, the first vaccine is administered about 8 weeks prior to administering the second vaccine. In some embodiments, the first vaccine is administered about 9 weeks prior to administering the second vaccine. In some embodiments, the first vaccine is administered about 10 weeks prior to administering the second vaccine. In some embodiments, the first vaccine is administered about 11 weeks prior to administering the second vaccine. In some embodiments, the first vaccine is administered about 12 weeks prior to administering the second vaccine. In some embodiments, the first vaccine is administered about 13 weeks prior to administering the second vaccine. In some embodiments, the first vaccine is administered about 14 weeks prior to administering the second vaccine. In some embodiments, the first vaccine is administered about 15 weeks prior to administering the second vaccine. In some embodiments, the first vaccine is administered about 16 weeks prior to administering the second vaccine.

[0784] The vaccines may be typically administered by intramuscular or subcutaneous injection. However other modes of administration such as intravenous, cutaneous, intradermal or nasal can be envisaged as well. Intramuscular administration of the vaccines can be achieved by using a needle. An alternative is the use of a needleless injection device to administer the composition (using, e.g., Biojector™) or a freeze-dried powder containing the vaccine.

[0785] For intravenous, cutaneous or subcutaneous injection, or injection at the site of affliction, the vaccine may be the form of a parenterally acceptable aqueous solution which is pyrogen-free and has suitable pH, isotonicity and stability. Those of skill in the art are well able to prepare suitable solutions using, for example, isotonic vehicles such as Sodium Chloride Injection, Ringer's Injection, Lactated Ringer's Injection. Preservatives, stabilizers, buffers, antioxidants and/or other additives can be included, as required. A slow-release formulation may also be employed.

[0786] Typically, administration will have a prophylactic aim to generate an immune response against the prostate neoantigens before development of symptoms of prostate cancer.

[0787] The vaccines are administered to a subject, giving rise to an immune response in the subject. An amount of the vaccine to induce a detectable immune response is termed an “immunologically effective dose.” The vaccines may induce a humoral as well as a cell-mediated immune response. In a typical embodiment the immune response is a protective immune response.

[0788] The actual amount administered, and rate and time-course of administration, will depend on the nature and severity of what is being treated. Prescription of treatment, e.g., decisions on dosage etc., is within the responsibility of general practitioners and other medical doctors, and typically takes account of the disorder to be treated, the condition of the individual patient, the site of delivery, the method of administration and other factors known to practitioners.

[0789] In one exemplary regimen, the adenovirus is administered (e.g., intramuscularly) in a volume ranging between about 100 μL to about 10 ml containing concentrations of about 10⁴ to 10¹² virus particles/ml. The adenovirus vector may be administered in a volume ranging between 0.25 and 1.0 ml, such as in a volume of 0.5 ml. The adenovirus may be administered in an amount of about 10⁹ to about 10¹² viral particles (vp) to a human subject during one administration, more typically in an amount of about 10¹⁰ to about 10¹² vp.

[0790] In one exemplary regimen, the MVA is administered (e.g., intramuscularly) in a volume ranging between about 100 μl to about 10 ml of saline solution containing a dose of about 1×10⁷ TCID₅₀ to 1×10⁹ TCID₅₀ (50% Tissue Culture Infective Dose) or Inf.U. (Infectious Unit). The MVA may be administered in a volume ranging between 0.25 and 1.0 ml.

[0791] Boosting vaccines may be administered two or more times, weeks or months after administration of the priming vaccine, for example, about 1 or 2 weeks, or 3 weeks, or 4 weeks, or 6 weeks, or 8 weeks, or 12 weeks, or 16 weeks, or 20 weeks, or 24 weeks, or 28 weeks, or 32 weeks, or one to two years after administration of the priming vaccine. Additional boosting vaccines may be administered 6 weeks to 5 years after the boosting step, such as 6, 7, 8, 9, 10, 11, 12, 13, 14, 15, 16, 17, 18, 19, 20, 21, 22, 23, 24, or 25 weeks, or 7, 8, 9, 10, 11, or 12 months, or 2, 3, 4, or 5 years, after the initial boosting inoculation. Optionally, the further boosting step can be repeated one or more times as needed.

[0792] The vaccines can be administered as part of a treatment cycle. In some embodiments, the treatment cycle comprises the administration of two doses of the vaccine to prime the immune response (“prime vaccine”) and the administration of two doses of the vaccine to boost the immune response (“boost vaccine”). For example, a treatment cycle may comprise the administration of two doses of any of the disclosed GAd20, Ad26, MVA, or self-replicating RNA molecule-based vaccines to prime the immune response and the administration of two doses of any of the disclosed GAd20, Ad26, MVA, or self-replicating RNA molecule-based vaccines to boost the immune response. Numerous treatment cycles can be administered. In some embodiments, 1, 2, 3, 4, 5, 6, 7, 8, 9, 10, or more than 10 treatment cycles can be administered. The treatment cycle(s) can be followed by one or more doses of boost vaccine (“further boost vaccine”). In some embodiments, the treatment cycle(s) are followed by 1, 2, 3, 4, 5, 6, 7, 8, 9, 10, or more than 10 further boost vaccines.

[0793] The prime vaccines can be administered 1 week, 2 weeks, 3 weeks, 4 weeks, or 5 weeks apart. The boost vaccines can be administered 1 week, 2 weeks, 3 weeks, 4 weeks, 5 weeks, 6 weeks, 7 weeks, 8 weeks, 9 weeks, 10 weeks, or more than 10 weeks from the prime vaccines. The boost vaccines can be administer 1 week, 2 weeks, 3 weeks, 4 weeks, 5 weeks, 6 weeks, 7 weeks, 8 weeks, 9 weeks, 10 weeks, or more than 10 weeks apart from the further boost vaccines.

### Prostate Neoantigen Combinations for Vaccine Therapy

[0794] The disclosed neoantigens were validated and prioritized for their inclusion into a universal prostate cancer vaccine. The considerations for inclusion are, for example, higher expression in prostate cancer tissues vs. normal prostate tissue and other normal tissues (such as liver, kidney, pancreas, ovary, prostate, mammary gland, colon, stomach, skeletal muscle and lung), or undetectable expression in normal tissues, ability of the neoantigens or their fragments to mediate activation of CD8⁺ T cells in known assays, binding to HLA, demonstrated in vivo processing and presentation to HLA of peptide fragments derived from the neoantigens and sufficient prevalence in prostate cancer subjects.

[0795] Through the validation process, the following neoantigens were identified as particularly useful to be included into a prostate cancer vaccine based on their expression profile, prevalence and in vitro immunogenicity—SEQ ID NOs: 275, 381, 333, 337, 269, 253, 309, 325, 271, 305, 251, 245, 261, 265, 317, 255, 277, 297, 285, 437, 439, 442, 444, 379, 343, 211, 349, 213, 215, 221, 219, 225, 345, 353, 235, 223, 167, 171, 19, 23, 177, 1001, and 1003. It is expected that any combination of these neoantigens can be utilized to generate a prostate cancer vaccine that can be delivered to a subject utilizing any available delivery vehicles and any form available, such as peptides, DNA, RNA, replicons, or using viral delivery. The neoantigens may be assembled into polynucleotides encoding polypeptides in any neoantigen order, and the neoantigen order may differ between the various delivery options. In general, assembly of the neoantigens into a particular order may be based on generating a minimum number of junctional epitopes utilizing known algorithms. Exemplary orders of the neoantigens are orders providing polypeptides of SEQ ID NOs: 541, 550, 554, 555, 556, 623, 624, 543, 552, 557, 558, 559, 625, or 626 as described herein and throughout the examples.

[0796] The vaccine can comprise a polynucleotide encoding a polypeptide, wherein the polypeptide comprises two or more polypeptides selected from the group consisting of SEQ ID NOs: 275, 381, 333, 337, 269, 253, 309, 325, 271, 305, 251, 245, 261, 265, 317, 255, 277, 297, 285, 437, 439, 442, 444, 379, 343, 211, 349, 213, 215, 221, 219, 225, 345, 353, 235, 223, 167, 171, 19, 23, 177, 1001, and 1003, and fragments thereof.

[0797] The vaccine can comprise a polynucleotide encoding a polypeptide, wherein the polypeptide comprises two or more polypeptides selected from the group consisting of SEQ ID NOs: 275, 381, 333, 337, 269, 253, 309, 325, 271, 305, 251, 245, 261, 265, 317, 255, 277, 297, 285, 437, 439, 442, 444, 379, 343, 213, 215, 221, 219, 225, 345, 353, 235, 223, 167, 171, 19, 23, 177, 1001, and 1003, and fragments thereof.

[0798] The vaccine can comprise a polynucleotide comprising two or more polynucleotides selected from the group consisting of SEQ ID NOs: 276, 382, 334, 338, 270, 254, 310, 326, 272, 306, 252, 246, 262, 266, 318, 256, 278, 298, 286, 448, 450, 453, 455, 380, 344, 212, 350, 214, 216, 222, 220, 226, 346, 354, 236, 224, 168, 172, 20, 24 and 178, 1000, 1002, and fragments thereof.

[0799] The vaccine can comprise a polynucleotide comprising two or more polynucleotides selected from the group consisting of SEQ ID NOs: 276, 382, 334, 338, 270, 254, 310, 326, 272, 306, 252, 246, 262, 266, 318, 256, 278, 298, 286, 448, 450, 453, 455, 380, 344, 214, 216, 222, 220, 226, 346, 354, 236, 224, 168, 172, 20, 24 and 178, 1000, 1002, and fragments thereof.

[0800] In some embodiments, the fragments comprise polypeptides of SEQ ID NOs: 387, 388, 390, 392, 560, 561, 562, 563, 564, 565, 566, 567, 568, 569, 570, 571, 572, 573, 574, 575, 576, 577, 578, 579, 580, 581, 582, 583, 584, 585, 586, 587, 588, 589, 590, 591, 592, 593, 594, 595, 596, 597, 598, 599, 600, 601, 602, 603, 604, 605, 606, 607, 608, 609, 610, 611, 612, 613, 614, 615, 616, 617, 618, 619, 620, 621, 631, 632, 633, 634, 635, 636, 637, 638, 639, 640, 641, 642, 643, 644, 645, 646, 647, 648, 649, 650, 651, 652, 653, 654, 655, 656, 657, 658, 659, 660, 661, 662, 663, 664, 665, 666, 667, 668, 669, 670, 671, 672, 673, 674, 675, 676, 677, 678, 679, 680, 681, 682, 683, 684, 685, 686, 687, 688, 689, 690, 691, 692, 693, 694, 695, 696, 697, 698, 699, 700, 701, 702, 703, 704, 705, 706, 707, 708, 709, 710 or 711.

[0801] The vaccine can elicit a cellular immune response in a subject administered the vaccine. In some embodiments, the cellular immune response is specific against a fragment of one or more polypeptides of SEQ ID NOs: 275, 381, 333, 337, 269, 253, 309, 325, 271, 305, 251, 245, 261, 265, 317, 255, 277, 297, 285, 437, 439, 442, 444, 379, 343, 211, 349, 213, 215, 221, 219, 225, 345, 353, 235, 223, 167, 171, 19, 23, 177, 1001, or 1003. In some embodiments, the cellular immune response is activation of vaccine-specific CD8⁺ T cells, CD4⁺ T cells, or CD8⁺ T cells and CD4⁺ T cells, wherein activation is assessed by increased production of TNFα, IFNγ, or TNFα and IFNγ by CD8⁺ T cells, CD4⁺ T cells, or CD8⁺ T cells and CD4⁺ T cells.

[0802] The polynucleotide can comprise a promoter, an enhancer, a polyadenylation site, a Kozak sequence, a stop codon, a T cell enhancer (TCE), or any combination thereof. In some embodiments, the promoter comprises a CMV promoter or a vaccinia P7.5 promoter. In some embodiments, the TCE is encoded by a polynucleotide of SEQ ID NO: 546, the CMV promoter comprises a polynucleotide of SEQ ID NO: 628, the vaccinia P7.5 promoter comprises a polynucleotide of SEQ ID NO: 630, and the polyadenylation site comprises a bovine growth hormone polyadenylation site of SEQ ID NO: 629.

[0803] The polypeptide can comprise an amino acid sequence of SEQ ID NOs: 541, 550, 554, 555, 556, 623, 624, 543, 552, 557, 558, 559, 625, or 626. In some embodiments, the polynucleotide comprises the polynucleotide sequence of SEQ ID NO: 544 or SEQ ID NO: 553. In some embodiments, the polynucleotide is DNA or RNA. In some embodiments, RNA is mRNA or self-replicating RNA.

[0804] The vaccine can comprise a polynucleotide encoding a polypeptide of SEQ ID NO: 541. The vaccine can comprise a polynucleotide encoding a polypeptide of SEQ ID NO: 550. The vaccine can comprise a polynucleotide encoding a polypeptide of SEQ ID NO: 554. The vaccine can comprise a polynucleotide encoding a polypeptide of SEQ ID NO: 555. The vaccine can comprise a polynucleotide encoding a polypeptide of SEQ ID NO: 556. The vaccine can comprise a polynucleotide encoding a polypeptide of SEQ ID NO: 623. The vaccine can comprise a polynucleotide encoding a polypeptide of SEQ ID NO: 624. The vaccine can comprise a polynucleotide encoding a polypeptide of SEQ ID NO: 543. The vaccine can comprise a polynucleotide encoding a polypeptide of SEQ ID NO: 552. The vaccine can comprise a polynucleotide encoding a polypeptide of SEQ ID NO: 557. The vaccine can comprise a polynucleotide encoding a polypeptide of SEQ ID NO: 558. The vaccine can comprise a polynucleotide encoding a polypeptide of SEQ ID NO: 559. The vaccine can comprise a polynucleotide encoding a polypeptide of SEQ ID NO: 625. The vaccine can comprise a polynucleotide encoding a polypeptide of SEQ ID NO: 626. The vaccine can comprise a polynucleotide encoding a polypeptide of SEQ ID NO: 542. The vaccine can comprise a polynucleotide encoding a polypeptide of SEQ ID NO: 551. The vaccine can comprise a polynucleotide encoding a polypeptide of SEQ ID NOs: 544. The vaccine can comprise a polynucleotide encoding a polypeptide of SEQ ID NOs: 553.

[0805] The vaccine can be a recombinant virus. In some embodiments, the recombinant virus is derived from adenovirus (Ad), poxvirus, adeno-associated virus (AAV), retrovirus or alphavirus. In some embodiments, the recombinant virus is derived from hAd5, hAd7, hAd11, hAd26, hAd34, hAd35, hAd48, hAd49, hAd50, GAd20, GAd19, GAd21, GAd25, GAd26, GAd27, GAd28, GAd29, GAd30, GAd31, ChAd3, ChAd4, ChAd5, ChAd6, ChAd7, ChAd8, ChAd9, ChAd10, ChAd11, ChAd16, ChAd17, ChAd19, ChAd20, ChAd22, ChAd24, ChAd26, ChAd30, ChAd31, ChAd37, ChAd38, ChAd44, ChAd55, ChAd63, ChAd73, ChAd82, ChAd83, ChAd146, ChAd147, PanAd1, PanAd2, PanAd3, Copenhagen vaccinia virus (W), New York Attenuated Vaccinia Virus (NYVAC), ALVAC, TROVAC, or modified vaccinia Ankara (MVA). In some embodiments, the recombinant virus is derived from GAd20. In some embodiments, the recombinant virus derived from GAd20 comprises a polynucleotide sequence of SEQ ID NO: 713. In some embodiments, the recombinant virus is derived from MVA. In some embodiments, the recombinant virus is derived from hAd26.

[0806] The vaccine can comprise a polynucleotide encoding a polypeptide of SEQ ID NO: 541, wherein the vaccine is a recombinant virus derived from GAd20. The vaccine can comprise a polynucleotide encoding a polypeptide of SEQ ID NO: 550, wherein the vaccine is a recombinant virus derived from GAd20. The vaccine can comprise a polynucleotide encoding a polypeptide of SEQ ID NO: 554, wherein the vaccine is a recombinant virus derived from GAd20. The vaccine can comprise a polynucleotide encoding a polypeptide of SEQ ID NO: 555, wherein the vaccine is a recombinant virus derived from GAd20. The vaccine can comprise a polynucleotide encoding a polypeptide of SEQ ID NO: 556, wherein the vaccine is a recombinant virus derived from GAd20. The vaccine can comprise a polynucleotide encoding a polypeptide of SEQ ID NO: 623, wherein the vaccine is a recombinant virus derived from GAd20. The vaccine can comprise a polynucleotide encoding a polypeptide of SEQ ID NO: 624, wherein the vaccine is a recombinant virus derived from GAd20. The vaccine can comprise a polynucleotide encoding a polypeptide of SEQ ID NO: 713, wherein the vaccine is a recombinant virus derived from GAd20. The vaccine can comprise a polynucleotide encoding a polypeptide of SEQ ID NO: 542, wherein the vaccine is a recombinant virus derived from GAd20. The vaccine can comprise a polynucleotide encoding a polypeptide of SEQ ID NO: 551, wherein the vaccine is a recombinant virus derived from GAd20.

[0807] The vaccine can comprise a polynucleotide encoding a polypeptide of SEQ ID NO: 543, wherein the vaccine is a recombinant virus derived from MVA. The vaccine can comprise a polynucleotide encoding a polypeptide of SEQ ID NO: 552, wherein the vaccine is a recombinant virus derived from MVA. The vaccine can comprise a polynucleotide encoding a polypeptide of SEQ ID NO: 557, wherein the vaccine is a recombinant virus derived from MVA. The vaccine can comprise a polynucleotide encoding a polypeptide of SEQ ID NO: 558, wherein the vaccine is a recombinant virus derived from MVA. The vaccine can comprise a polynucleotide encoding a polypeptide of SEQ ID NO: 559, wherein the vaccine is a recombinant virus derived from MVA. The vaccine can comprise a polynucleotide encoding a polypeptide of SEQ ID NO: 625, wherein the vaccine is a recombinant virus derived from MVA. The vaccine can comprise a polynucleotide encoding a polypeptide of SEQ ID NO: 626, wherein the vaccine is a recombinant virus derived from MVA. The vaccine can comprise a polynucleotide encoding a polypeptide of SEQ ID NO: 544, wherein the vaccine is a recombinant virus derived from MVA. The vaccine can comprise a polynucleotide encoding a polypeptide of SEQ ID NO: 553, wherein the vaccine is a recombinant virus derived from MVA.

[0808] The vaccine can comprise a recombinant virus derived from alphavirus species include Eastern equine encephalitis virus (EEEV), Venezuelan equine encephalitis virus (VEEV), Everglades virus (EVEV), Mucambo virus (MUCV), Semliki forest virus (SFV), Pixuna virus (PIXV), Middleburg virus (MIDV), Chikungunya virus (CHIKV), O'Nyong-Nyong virus (ONNV), Ross River virus (RRV), Barmah Forest virus (BF), Getah virus (GET), Sagiyama virus (SAGV), Bebaru virus (BEBV), Mayaro virus (MAYV), Una virus (UNAV), Sindbis virus (SINV), Aura virus (AURAV), Whataroa virus (WHAV), Babanki virus (BABV), Kyzylagach virus (KYZV), Western equine encephalitis virus (WEEV), Highland J virus (HJV), Fort Morgan virus (FMV), Ndumu (NDUV), and Buggy Creek virus. Virulent and avirulent alphavirus strains are both suitable. In some embodiments, the alphavirus RNA replicon is of a Sindbis virus (SIN), a Semliki Forest virus (SFV), a Ross River virus (RRV), a Venezuelan equine encephalitis virus (VEEV), or an Eastern equine encephalitis virus (EEEV). In some embodiments, the recombinant virus is derived from VEEV.

[0809] The vaccine can comprise a self-replicating RNA molecule comprising an RNA encoding a polypeptide of SEQ ID NO: 541, wherein the vaccine is a recombinant virus derived from VEEV. The vaccine can comprise a self-replicating RNA molecule comprising an RNA encoding a polypeptide of SEQ ID NO: 543, wherein the vaccine is a recombinant virus derived from VEEV. The vaccine can comprise a self-replicating RNA molecule comprising an RNA encoding a polypeptide of SEQ ID NO: 550, wherein the vaccine is a recombinant virus derived from VEEV. The vaccine can comprise a self-replicating RNA molecule comprising an RNA encoding a polypeptide of SEQ ID NO: 552, wherein the vaccine is a recombinant virus derived from VEEV. The vaccine can comprise a self-replicating RNA molecule comprising an RNA encoding a polypeptide of SEQ ID NO: 554, wherein the vaccine is a recombinant virus derived from VEEV. The vaccine can comprise a self-replicating RNA molecule comprising an RNA encoding a polypeptide of SEQ ID NO: 555, wherein the vaccine is a recombinant virus derived from VEEV. The vaccine can comprise a self-replicating RNA molecule comprising an RNA encoding a polypeptide of SEQ ID NO: 556, wherein the vaccine is a recombinant virus derived from VEEV. The vaccine can comprise a self-replicating RNA molecule comprising an RNA encoding a polypeptide of SEQ ID NO: 557, wherein the vaccine is a recombinant virus derived from VEEV. The vaccine can comprise a self-replicating RNA molecule comprising an RNA encoding a polypeptide of SEQ ID NO: 558, wherein the vaccine is a recombinant virus derived from VEEV. The vaccine can comprise a self-replicating RNA molecule comprising an RNA encoding a polypeptide of SEQ ID NO: 559, wherein the vaccine is a recombinant virus derived from VEEV. The vaccine can comprise a self-replicating RNA molecule comprising an RNA encoding a polypeptide of SEQ ID NO: 623, wherein the vaccine is a recombinant virus derived from VEEV. The vaccine can comprise a self-replicating RNA molecule comprising an RNA encoding a polypeptide of SEQ ID NO: 624, wherein the vaccine is a recombinant virus derived from VEEV. The vaccine can comprise a self-replicating RNA molecule comprising an RNA encoding a polypeptide of SEQ ID NO: 625, wherein the vaccine is a recombinant virus derived from VEEV. The vaccine can comprise a self-replicating RNA molecule comprising an RNA encoding a polypeptide of SEQ ID NO: 626, wherein the vaccine is a recombinant virus derived from VEEV.

[0810] The methods of treating or preventing a prostate cancer in a subject can comprise administering to the subject a therapeutically effective amount of a vaccine comprising a recombinant virus derived from GAd20 comprising a polynucleotide encoding a polypeptide of SEQ ID NOs: 541, 550, 554, 555, 556, 623 or 624. The methods of treating or preventing a prostate cancer in a subject can comprise administering to the subject a therapeutically effective amount of a vaccine comprising a recombinant virus derived from GAd20 comprising a polynucleotide encoding a polypeptide of SEQ ID NO: 541. The methods of treating or preventing a prostate cancer in a subject can comprise administering to the subject a therapeutically effective amount of a vaccine comprising a recombinant virus derived from GAd20 comprising a polynucleotide encoding a polypeptide of SEQ ID NO: 550. The methods of treating or preventing a prostate cancer in a subject can comprise administering to the subject a therapeutically effective amount of a vaccine comprising a recombinant virus derived from GAd20 comprising a polynucleotide encoding a polypeptide of SEQ ID NO: 554. The methods of treating or preventing a prostate cancer in a subject can comprise administering to the subject a therapeutically effective amount of a vaccine comprising a recombinant virus derived from GAd20 comprising a polynucleotide encoding a polypeptide of SEQ ID NO: 555. The methods of treating or preventing a prostate cancer in a subject can comprise administering to the subject a therapeutically effective amount of a vaccine comprising a recombinant virus derived from GAd20 comprising a polynucleotide encoding a polypeptide of SEQ ID NO: 556. The methods of treating or preventing a prostate cancer in a subject can comprise administering to the subject a therapeutically effective amount of a vaccine comprising a recombinant virus derived from GAd20 comprising a polynucleotide encoding a polypeptide of SEQ ID NO: 623. The methods of treating or preventing a prostate cancer in a subject can comprise administering to the subject a therapeutically effective amount of a vaccine comprising a recombinant virus derived from GAd20 comprising a polynucleotide encoding a polypeptide of SEQ ID NO: 624.

[0811] The methods of treating or preventing a prostate cancer in a subject can comprise administering to the subject a therapeutically effective amount of a vaccine comprising a recombinant virus derived from MVA comprising a polynucleotide encoding a polypeptide of SEQ ID NOs: 543, 552, 557, 558, 559, 625 or 626. The methods of treating or preventing a prostate cancer in a subject can comprise administering to the subject a therapeutically effective amount of a vaccine comprising a recombinant virus derived from MVA comprising a polynucleotide encoding a polypeptide of SEQ ID NO: 543. The methods of treating or preventing a prostate cancer in a subject can comprise administering to the subject a therapeutically effective amount of a vaccine comprising a recombinant virus derived from MVA comprising a polynucleotide encoding a polypeptide of SEQ ID NO: 552. The methods of treating or preventing a prostate cancer in a subject can comprise administering to the subject a therapeutically effective amount of a vaccine comprising a recombinant virus derived from MVA comprising a polynucleotide encoding a polypeptide of SEQ ID NO: 557. The methods of treating or preventing a prostate cancer in a subject can comprise administering to the subject a therapeutically effective amount of a vaccine comprising a recombinant virus derived from MVA comprising a polynucleotide encoding a polypeptide of SEQ ID NO: 558. The methods of treating or preventing a prostate cancer in a subject can comprise administering to the subject a therapeutically effective amount of a vaccine comprising a recombinant virus derived from MVA comprising a polynucleotide encoding a polypeptide of SEQ ID NO: 559. The methods of treating or preventing a prostate cancer in a subject can comprise administering to the subject a therapeutically effective amount of a vaccine comprising a recombinant virus derived from MVA comprising a polynucleotide encoding a polypeptide of SEQ ID NO: 625. The methods of treating or preventing a prostate cancer in a subject can comprise administering to the subject a therapeutically effective amount of a vaccine comprising a recombinant virus derived from MVA comprising a polynucleotide encoding a polypeptide of SEQ ID NO: 626.

[0812] The methods of treating or preventing a prostate cancer in a subject can comprise administering to the subject a therapeutically effective amount of a vaccine comprising a self-replicating RNA molecule derived from VEEV comprising a RNA encoding a heterologous polypeptide of SEQ ID NOs: 541, 543, 550, 552, 554, 555, 556, 557, 558, 559, 623, 624, 625, 626, 1004, or 1005. The methods of treating or preventing a prostate cancer in a subject can comprise administering to the subject a therapeutically effective amount of a vaccine comprising a self-replicating RNA molecule derived from VEEV comprising a RNA encoding a polynucleotide encoding a polypeptide of SEQ ID NOs: 541. The methods of treating or preventing a prostate cancer in a subject can comprise administering to the subject a therapeutically effective amount of a vaccine comprising a self-replicating RNA molecule derived from VEEV comprising a RNA encoding a polynucleotide encoding a polypeptide of SEQ ID NOs: 543. The methods of treating or preventing a prostate cancer in a subject can comprise administering to the subject a therapeutically effective amount of a vaccine comprising a self-replicating RNA molecule derived from VEEV comprising a RNA encoding a polynucleotide encoding a polypeptide of SEQ ID NOs: 550. The methods of treating or preventing a prostate cancer in a subject can comprise administering to the subject a therapeutically effective amount of a vaccine comprising a self-replicating RNA molecule derived from VEEV comprising a RNA encoding a polynucleotide encoding a polypeptide of SEQ ID NOs: 552. The methods of treating or preventing a prostate cancer in a subject can comprise administering to the subject a therapeutically effective amount of a vaccine comprising a self-replicating RNA molecule derived from VEEV comprising a RNA encoding a polynucleotide encoding a polypeptide of SEQ ID NOs: 554. The methods of treating or preventing a prostate cancer in a subject can comprise administering to the subject a therapeutically effective amount of a vaccine comprising a self-replicating RNA molecule derived from VEEV comprising a RNA encoding a polynucleotide encoding a polypeptide of SEQ ID NOs: 555. The methods of treating or preventing a prostate cancer in a subject can comprise administering to the subject a therapeutically effective amount of a vaccine comprising a self-replicating RNA molecule derived from VEEV comprising a RNA encoding a polynucleotide encoding a polypeptide of SEQ ID NOs: 556. The methods of treating or preventing a prostate cancer in a subject can comprise administering to the subject a therapeutically effective amount of a vaccine comprising a self-replicating RNA molecule derived from VEEV comprising a RNA encoding a polynucleotide encoding a polypeptide of SEQ ID NOs: 557. The methods of treating or preventing a prostate cancer in a subject can comprise administering to the subject a therapeutically effective amount of a vaccine comprising a self-replicating RNA molecule derived from VEEV comprising a RNA encoding a polynucleotide encoding a polypeptide of SEQ ID NOs: 558. The methods of treating or preventing a prostate cancer in a subject can comprise administering to the subject a therapeutically effective amount of a vaccine comprising a self-replicating RNA molecule derived from VEEV comprising a RNA encoding a polynucleotide encoding a polypeptide of SEQ ID NOs: 559. The methods of treating or preventing a prostate cancer in a subject can comprise administering to the subject a therapeutically effective amount of a vaccine comprising a self-replicating RNA molecule derived from VEEV comprising a RNA encoding a polynucleotide encoding a polypeptide of SEQ ID NOs: 623. The methods of treating or preventing a prostate cancer in a subject can comprise administering to the subject a therapeutically effective amount of a vaccine comprising a self-replicating RNA molecule derived from VEEV comprising a RNA encoding a polynucleotide encoding a polypeptide of SEQ ID NOs: 624. The methods of treating or preventing a prostate cancer in a subject can comprise administering to the subject a therapeutically effective amount of a vaccine comprising a recombinant virus derived from VEEV comprising a polynucleotide encoding a polypeptide of SEQ ID NOs: 625. The methods of treating or preventing a prostate cancer in a subject can comprise administering to the subject a therapeutically effective amount of a vaccine comprising a self-replicating RNA molecule derived from VEEV comprising a RNA encoding a polynucleotide encoding a polypeptide of SEQ ID NOs: 626.

[0813] The use of a vaccine comprising a recombinant virus derived from GAd20 comprising a polynucleotide encoding a polypeptide of SEQ ID NOs: 541, 550, 554, 555, 556, 623 or 624 for the preparation of a medicament for treating or preventing a prostate cancer is also provided. In some embodiments, the GAd20 comprises a polynucleotide encoding a polypeptide of SEQ ID NO: 541. In some embodiments, the GAd20 comprises a polynucleotide encoding a polypeptide of SEQ ID NO: 550. In some embodiments, the GAd20 comprises a polynucleotide encoding a polypeptide of SEQ ID NO: 554. In some embodiments, the GAd20 comprises a polynucleotide encoding a polypeptide of SEQ ID NO: 555. In some embodiments, the GAd20 comprises a polynucleotide encoding a polypeptide of SEQ ID NO: 556. In some embodiments, the GAd20 comprises a polynucleotide encoding a polypeptide of SEQ ID NO: 623. In some embodiments, the GAd20 comprises a polynucleotide encoding a polypeptide of SEQ ID NO: 624.

[0814] The use of a vaccine comprising a recombinant virus derived from MVA comprising a polynucleotide encoding a polypeptide of SEQ ID NOs: 543, 552, 557, 558, 559, 625 or 626 for the preparation of a medicament for treating or preventing a prostate cancer is also provided. In some embodiments, the MVA comprises a polynucleotide encoding a polypeptide of SEQ ID NO: 543. In some embodiments, the MVA comprises a polynucleotide encoding a polypeptide of SEQ ID NO: 552. In some embodiments, the MVA comprises a polynucleotide encoding a polypeptide of SEQ ID NO: 557. In some embodiments, the MVA comprises a polynucleotide encoding a polypeptide of SEQ ID NO: 558. In some embodiments, the MVA comprises a polynucleotide encoding a polypeptide of SEQ ID NO: 559. In some embodiments, the MVA comprises a polynucleotide encoding a polypeptide of SEQ ID NO: 625. In some embodiments, the MVA comprises a polynucleotide encoding a polypeptide of SEQ ID NO: 626.

[0815] The use of a vaccine comprising a self-replicating RNA molecule derived from VEEV comprising an RNA encoding a polypeptide of SEQ ID NOs: 541, 543, 550, 552, 554, 555, 556, 557, 558, 559, 623, 624, 625, 626, 1004, or 1005 for the preparation of a medicament for treating or preventing a prostate cancer is also provided. In some embodiments, the self-replicating RNA molecule derived from VEEV comprises an RNA encoding a polypeptide of SEQ ID NOs: 541. In some embodiments, the self-replicating RNA molecule derived from VEEV comprises an RNA encoding a polypeptide of SEQ ID NOs: 543. In some embodiments, the self-replicating RNA molecule derived from VEEV comprises an RNA encoding a polypeptide of SEQ ID NOs: 550. In some embodiments, the self-replicating RNA molecule derived from VEEV comprises an RNA encoding a polypeptide of SEQ ID NOs: 552. In some embodiments, the self-replicating RNA molecule derived from VEEV comprises an RNA encoding a polypeptide of SEQ ID NOs: 554. In some embodiments, the self-replicating RNA molecule derived from VEEV comprises an RNA encoding a polypeptide of SEQ ID NOs: 555. In some embodiments, the self-replicating RNA molecule derived from VEEV comprises an RNA encoding a polypeptide of SEQ ID NOs: 556. In some embodiments, the self-replicating RNA molecule derived from VEEV comprises an RNA encoding a polypeptide of SEQ ID NOs: 557. In some embodiments, the self-replicating RNA molecule derived from VEEV comprises an RNA encoding a polypeptide of SEQ ID NOs: 558. In some embodiments, the self-replicating RNA molecule derived from VEEV comprises an RNA encoding a polypeptide of SEQ ID NOs: 559. In some embodiments, the self-replicating RNA molecule derived from VEEV comprises an RNA encoding a polypeptide of SEQ ID NOs: 623. In some embodiments, the self-replicating RNA molecule derived from VEEV comprises an RNA encoding a polypeptide of SEQ ID NOs: 624. In some embodiments, the self-replicating RNA molecule derived from VEEV comprises an RNA encoding a polypeptide of SEQ ID NOs: 625. In some embodiments, the self-replicating RNA molecule derived from VEEV comprises an RNA encoding a polypeptide of SEQ ID NOs: 626.

[0816] Also provided is a vaccine comprising a recombinant virus derived from GAd20 comprising a polynucleotide encoding a polypeptide of SEQ ID NOs: 541, 550, 554, 555, 556, 623 or 624 for use in treating or preventing a prostate cancer. In some embodiments, the GAd20 comprises a polynucleotide encoding a polypeptide of SEQ ID NO: 541. In some embodiments, the GAd20 comprises a polynucleotide encoding a polypeptide of SEQ ID NO: 550. In some embodiments, the GAd20 comprises a polynucleotide encoding a polypeptide of SEQ ID NO: 554. In some embodiments, the GAd20 comprises a polynucleotide encoding a polypeptide of SEQ ID NO: 555. In some embodiments, the GAd20 comprises a polynucleotide encoding a polypeptide of SEQ ID NO: 556. In some embodiments, the GAd20 comprises a polynucleotide encoding a polypeptide of SEQ ID NO: 623. In some embodiments, the GAd20 comprises a polynucleotide encoding a polypeptide of SEQ ID NO: 624.

[0817] Also provided is a vaccine comprising a recombinant virus derived from MVA comprising a polynucleotide encoding a polypeptide of SEQ ID NOs: 543, 552, 557, 558, 559, 625 or 626 for use in treating or preventing a prostate cancer. In some embodiments, the MVA comprises a polynucleotide encoding a polypeptide of SEQ ID NO: 543. In some embodiments, the MVA comprises a polynucleotide encoding a polypeptide of SEQ ID NO: 552. In some embodiments, the MVA comprises a polynucleotide encoding a polypeptide of SEQ ID NO: 557. In some embodiments, the MVA comprises a polynucleotide encoding a polypeptide of SEQ ID NO: 558. In some embodiments, the MVA comprises a polynucleotide encoding a polypeptide of SEQ ID NO: 559. In some embodiments, the MVA comprises a polynucleotide encoding a polypeptide of SEQ ID NO: 625. In some embodiments, the MVA comprises a polynucleotide encoding a polypeptide of SEQ ID NO: 626.

[0818] Also provided is a vaccine comprising a self-replicating RNA molecule comprising an RNA corresponding to a polynucleotide encoding a polypeptide of SEQ ID NOs: 541, 543, 550, 552, 554, 555, 556, 557, 558, 559, 623, 624, 625, 626, 1004, or 1005 for use in treating or preventing a prostate cancer. In some embodiments, the self-replicating RNA molecule comprises an RNA corresponding to a polynucleotide encoding a polypeptide of SEQ ID NOs: 541. In some embodiments, the self-replicating RNA molecule comprises an RNA corresponding to a polynucleotide encoding a polypeptide of SEQ ID NOs: 543. In some embodiments, the self-replicating RNA molecule comprises an RNA corresponding to a polynucleotide encoding a polypeptide of SEQ ID NOs: 550. In some embodiments, the self-replicating RNA molecule comprises an RNA corresponding to a polynucleotide encoding a polypeptide of SEQ ID NOs: 552. In some embodiments, the self-replicating RNA molecule comprises an RNA corresponding to a polynucleotide encoding a polypeptide of SEQ ID NOs: 554. In some embodiments, the self-replicating RNA molecule comprises an RNA corresponding to a polynucleotide encoding a polypeptide of SEQ ID NOs: 555. In some embodiments, the self-replicating RNA molecule comprises an RNA corresponding to a polynucleotide encoding a polypeptide of SEQ ID NOs: 556. In some embodiments, the self-replicating RNA molecule comprises an RNA corresponding to a polynucleotide encoding a polypeptide of SEQ ID NOs: 557. In some embodiments, the self-replicating RNA molecule comprises an RNA corresponding to a polynucleotide encoding a polypeptide of SEQ ID NOs: 558. In some embodiments, the self-replicating RNA molecule comprises an RNA corresponding to a polynucleotide encoding a polypeptide of SEQ ID NOs: 559. In some embodiments, the self-replicating RNA molecule comprises an RNA corresponding to a polynucleotide encoding a polypeptide of SEQ ID NOs: 623. In some embodiments, the self-replicating RNA molecule comprises an RNA corresponding to a polynucleotide encoding a polypeptide of SEQ ID NOs: 624. In some embodiments, the self-replicating RNA molecule comprises an RNA corresponding to a polynucleotide encoding a polypeptide of SEQ ID NOs: 625. In some embodiments, the self-replicating RNA molecule comprises an RNA corresponding to a polynucleotide encoding a polypeptide of SEQ ID NOs: 626.

[0819] The vaccine comprising a recombinant virus derived from GAd20 can be administered as a prime. The vaccine comprising a recombinant virus derived from MVA can be administered as a boost. The vaccine comprising a self-replicating RNA molecule can be administered as a boost.

[0820] In some embodiments, the vaccine comprising the polynucleotide sequence encoding a polypeptide of SEQ ID NOs: 541 or 550 is administered as a prime.

[0821] In some embodiments, the vaccine comprising the polynucleotide sequence encoding a polypeptide of SEQ ID NOs 543 or 552 is administered as a boost.

[0822] In some embodiments, the vaccine comprising the polynucleotide sequence encoding a polypeptide of SEQ ID NOs 541, 543, 550, 552, 554, 555, 556, 557, 558, 559, 623, 624, 625, 626, 1004, or 1005 is administered as a boost.

[0823] The methods of treating or preventing a prostate cancer in a subject can comprise:
[0824] administering to the subject a therapeutically effective amount of a vaccine comprising a polynucleotide encoding a polypeptide comprising two, three, four, five, six, seven, eight, nine, ten, 11, 12, 13, 14, 15, 16, 17, 18, 19, 20, 21, 22, 23, 24, 25, 26, 27, 28, 29, 30, 31, 32, 33, 34, 35, 36, 37, 38, 39, 40, 41, 42, or 43 polypeptides selected from the group consisting of SEQ ID NOs: 275, 381, 333, 337, 269, 253, 309, 325, 271, 305, 251, 245, 261, 265, 317, 255, 277, 297, 285, 437, 439, 442, 444, 379, 343, 211, 349, 213, 215, 221, 219, 225, 345, 353, 235, 223, 167, 171, 19, 23, 177, 1001, and 1003 and fragments thereof as a prime; and
[0825] administering to the subject a therapeutically effective amount of a vaccine comprising a polynucleotide encoding a polypeptide comprising two, three, four, five, six, seven, eight, nine, ten, 11, 12, 13, 14, 15, 16, 17, 18, 19, 20, 21, 22, 23, 24, 25, 26, 27, 28, 29, 30, 31, 32, 33, 34, 35, 36, 37, 38, 39, 40, 41, 42, or 43 polypeptides selected from the group consisting of SEQ ID NOs: 275, 381, 333, 337, 269, 253, 309, 325, 271, 305, 251, 245, 261, 265, 317, 255, 277, 297, 285, 437, 439, 442, 444, 379, 343, 211, 349, 213, 215, 221, 219, 225, 345, 353, 235, 223, 167, 171, 19, 23, 177, 1001 and 1003 and fragments thereof as a boost; thereby treating or preventing the prostate cancer in the subject.

[0826] The methods of treating or preventing a prostate cancer in a subject can comprise administering to the subject

[0827] a first vaccine comprising a first polynucleotide encoding a first polypeptide, wherein the first polypeptide comprises two or more polypeptides selected from the group consisting of SEQ ID NOs: 275, 381, 333, 337, 269, 253, 309, 325, 271, 305, 251, 245, 261, 265, 317, 255, 277, 297, 285, 437, 439, 442, 444, 379, 343, 211, 349, 213, 215, 221, 219, 225, 345, 353, 235, 223, 167, 171, 19, 23, 177, 1001, and 1003; and

[0828] a second vaccine comprising a second polynucleotide encoding a second polypeptide, wherein the second polypeptide comprises two or more polypeptides selected from the group consisting of SEQ ID NOs: 275, 381, 333, 337, 269, 253, 309, 325, 271, 305, 251, 245, 261, 265, 317, 255, 277, 297, 285, 437, 439, 442, 444, 379, 343, 211, 349, 213, 215, 221, 219, 225, 345, 353, 235, 223, 167, 171, 19, 23, 177, 1001, and 1003.

[0829] The methods of treating or preventing a prostate cancer in a subject can comprise administering to the subject

[0830] a first vaccine comprising a first polynucleotide encoding a first polypeptide, wherein the first polypeptide comprises two or more polypeptides selected from the group consisting of SEQ ID NOs: 275, 381, 333, 337, 269, 253, 309, 325, 271, 305, 251, 245, 261, 265, 317, 255, 277, 297, 285, 437, 439, 442, 444, 379, 343, 211, 349, 213, 215, 221, 219, 225, 345, 353, 235, 223, 167, 171, 19, 23, 177, 1001, and 1003; and

[0831] a second vaccine comprising a second polynucleotide encoding a second polypeptide, wherein the second polypeptide comprises two or more polypeptides selected from the group consisting of SEQ ID NOs: 275, 381, 333, 337, 269, 253, 309, 325, 271, 305, 251, 245, 261, 265, 317, 255, 277, 297, 285, 437, 439, 442, 444, 379, 343, 211, 349, 213, 215, 221, 219, 225, 345, 353, 235, 223, 167, 171, 19, 23, 177, 1001, and 1003; wherein the first polypeptide and the second polypeptide have distinct amino acid sequences.

[0832] The polypeptides can be organized in a first order and in a second order. In some embodiments, the polypeptides organized in the first order comprises a polypeptide of SEQ ID NO: 541, 543, 550, 552, 554, 555, 556, 557, 558, 559, 623, 624, 625, 626, 1004, or 1005. In some embodiments, the polypeptides organized in the first order comprises a polypeptide of SEQ ID NO: 541 or SEQ ID NO: 550. In some embodiments, the polypeptides organized in the second order comprises a polypeptide of SEQ ID NO: 543 or SEQ ID NO: 552. In some embodiments, the polypeptides organized in the first order comprises a polypeptide of SEQ ID NO: 542, 551, 544, or 553.

[0833] The methods of treating or preventing a prostate cancer in a subject can comprise administering to the subject

[0834] a first vaccine comprising a first polynucleotide encoding a first polypeptide, wherein the first polypeptide comprises an amino acid sequence of SEQ ID NOs: 541, 550, 554, 555, 556, 623 or 624; and

[0835] a second vaccine comprising a second polynucleotide encoding a second polypeptide, wherein the second polypeptide comprises the amino acid sequence of SEQ ID NOs: 543, 552, 557, 558, 559, 625 or 626.

[0836] The methods of treating or preventing a prostate cancer in a subject can comprise administering to the subject

[0837] a first vaccine comprising a first polynucleotide encoding a first polypeptide, wherein the first polypeptide comprises an amino acid sequence of SEQ ID NO: 541; and

[0838] a second vaccine comprising a second polynucleotide encoding a second polypeptide, wherein the second polypeptide comprises the amino acid sequence of SEQ ID NO: 543.

### Combination Therapies

[0839] The disclosed vaccines may be used in combination with at least one additional cancer therapeutic agent for treating prostate cancer. The additional cancer therapeutic agent may be a chemotherapy, an androgen deprivation therapy, radiation therapy, targeted therapy or a checkpoint inhibitor, or any combination thereof. The disclosed vaccines may also be used in combination with surgery.

[0840] Exemplary chemotherapeutic agents are alkylating agents; nitrosoureas; antimetabolites; antitumor antibiotics; plant alkyloids; taxanes; hormonal agents; and miscellaneous agents, such as busulfan, carboplatin, chlorambucil, cisplatin, cyclophosphamide, dacarbazine, ifosfamide, mechlorethamine hydrochloride, melphalan, procarbazine, thiotepa, uracil mustard, 5-fluorouracil, 6-mercaptopurine, capecitabine, cytosine arabinoside, floxuridine, fludarabine, gemcitabine, methotrexate, thioguanine, dactinomycin, daunorubicin, doxorubicin, idarubicin, mitomycin-C, and mitoxantrone, vinblastine, vincristine, vindesine, vinorelbine, paclitaxel, docetaxel.

[0841] Exemplary androgen deprivation therapies include abiraterone acetate, ketoconazole, enzalutamide, galeterone, ARN-509 and orteronel (TAK-700) and surgical removal of the testicles.

[0842] Radiation therapy may be administered using various methods, including external-beam therapy, internal radiation therapy, implant radiation, stereotactic radiosurgery, systemic radiation therapy, radiotherapy and permanent or temporary interstitial brachytherapy. External-beam therapy involves three-dimensional, conformal radiation therapy where the field of radiation is designed, local radiation (e.g., radiation directed to a preselected target or organ), or focused radiation. Focused radiation may be selected from stereotactic radiosurgery, fractionated stereotactic radiosurgery or intensity-modulated radiation therapy. Focused radiation may have particle beam (proton), cobalt-60 (photon) linear accelerator (x-ray) as a radiation source (see e.g. WO 2012/177624). “Brachytherapy,” refers to radiation therapy delivered by a spatially confined radioactive material inserted into the body at or near a tumor or other proliferative tissue disease site, and includes exposure to radioactive isotopes (e.g., At-211, I-131, I-125, Y-90, Re-186, Re-188, Sm-153, Bi-212, P-32, and radioactive isotopes of Lu). Suitable radiation sources for use as a cell conditioner include both solids and liquids. The radiation source can be a radionuclide, such as I-125, I-131, Yb-169, Ir-192 as a solid source, I-125 as a solid source, or other radionuclides that emit photons, beta particles, gamma radiation, or other therapeutic rays. The radioactive material may also be a fluid made from any solution of radionuclide(s), e.g., a solution of I-125 or I-131, or a radioactive fluid can be produced using a slurry of a suitable fluid containing small particles of solid radionuclides, such as Au-198, Y-90. The radionuclide(s) may be embodied in a gel or radioactive micro spheres.

[0843] Targeted therapies include anti-androgen therapies, inhibitors of angiogenesis such as bevacizumab, anti-PSA or anti-PSMA antibodies or vaccines enhancing immune responses to PSA or PSMA.

[0844] Exemplary checkpoint inhibitors are antagonists of PD-1, PD-L1, PD-L2, VISTA, BTNL2, B7-H3, B7-H4, HVEM, HHLA2, CTLA-4, LAG-3, TIM-3, BTLA, CD160, CEACAM-1, LAIR1, TGFβ, IL-10, Siglec family protein, KIR, CD96, TIGIT, NKG2A, CD112, CD47, SIRPA or CD244. A molecule is an antagonist when the at least one reaction or activity is suppressed by at least about 30%, 40%, 45%, 50%, 55%, 60%, 65%, 70%, 75%, 80%, 85%, 90%, 95%, or 100% more than the at least one reaction or activity suppressed in the absence of the antagonist (e.g., negative control), or when the suppression is statistically significant when compared to the suppression in the absence of the antagonist. Antagonist may be an antibody, a soluble ligand, a small molecule, a DNA or RNA such as siRNA. Exemplary antagonists of checkpoint inhibitors are described in U.S. Pat. Publ. No. 2017/0121409.

[0845] In some embodiments, one or more of the disclosed vaccines is administered in combination with a CTLA-4 antibody, a CTLA4 ligand, a PD-1 axis inhibitor, a PD-L1 axis inhibitor, a TLR agonist, a CD40 agonist, an OX40 agonist, hydroxyurea, ruxolitinib, fedratinib, a 41BB agonist, aa CD28 agonist, a STING antagonist, a RIG-1 antagonist, TCR-T therapy, CAR-T therapy, FLT3 ligand, aluminum sulfate, BTK inhibitor, CD38 antibody, CDK inhibitor, CD33 antibody, CD37 antibody, CD25 antibody, GM-CSF inhibitor, IL-2, IL-15, IL-7, CD3 redirection molecules, pomalimib, IFNγ, IFNα, TNFα, VEGF antibody, CD70 antibody, CD27 antibody, BCMA antibody or GPRC5D antibody, any combination thereof.

[0846] In some embodiments, the checkpoint inhibitor is ipilimumab, cetrelimab, pembrolizumab, nivolumab, sintilimab. cemiplimab, toripalimab, camrelizumab, tislelizumab, dostralimab, spartalizumab, prolgolimab, AK-105, HLX-10, balstilimab, MEDI-0680, HX-008, GLS-010, BI-754091, genolimzumab, AK-104, MGA-012, F-520, 609A, LY-3434172, AMG-404, SL-279252, SCT-I10A, RO-7121661, ICTCAR-014, MEDI-5752, CS-1003, XmAb-23104, Sym-021, LZM-009, hAB21, BAT-1306, MGD-019, JTX-4014, budigalimab, XmAb-20717, AK-103, MGD-013, IBI-318, sasanlimab, CC-90006, avelumab, atezolizumab, durvalumab, CS-1001, bintrafusp alpha, envafolimab, CX-072, GEN-1046, GS-4224, KL-A167, BGB-A333, SHR-1316, CBT-502, IL-103, KN-046, ZKAB-001, CA-170, TG 1501, LP-002, INCB-86550, ADG-104, SHR-1701, BCD-135, IMC-001, MSB-2311, FPT-155, FAZ-053, HLX-20, iodapolimab, FS-118, BMS-986189, AK-106, MCLA-145, IBI-318 or CK-301, or any combination thereof.

[0847] In some embodiments, one or more of the disclosed vaccines are administered in combination with ipilimumab, cetrelimab, pembrolizumab, nivolumab, sintilimab. cemiplimab, toripalimab, camrelizumab, tislelizumab, dostralimab, spartalizumab, prolgolimab, balstilimab, budigalimab, sasanlimab, avelumab, atezolizumab, durvalumab, envafolimab or iodapolimab, or any combination thereof.

### Kits

[0848] Also disclosed herein are kits comprising one or more of the disclosed vaccines. The disclosed kits can comprise one or more of the disclosed recombinant viruses. The kits may be used to facilitate performing the methods described herein. In some embodiments, the kit further comprises reagents to facilitate entry of the vaccines of the disclosure into a cell, such as lipid-based formulations or viral packaging materials.

[0849] In some embodiments, the kit comprises any of the disclosed Ad26 viruses. In some embodiments, the kit comprises any of the disclosed MVA viruses. In some embodiments, the kit comprises any of the disclosed GAd viruses. In some embodiments, the kit comprises any of the disclosed Ad26 viruses and any of the disclosed MVA viruses. In some embodiments, the kit comprises any of the disclosed GAd viruses and any of the disclosed MVA viruses. In some embodiments, the kit comprises any of the disclosed Ad26 viruses and any of the disclosed GAd viruses. In some embodiments, the kit comprises any of the disclosed self-replicating RNA molecules and any of the disclosed GAd viruses. In some embodiments, the kit comprises any of the disclosed self-replicating RNA molecules and any of the disclosed MVA viruses. In some embodiments, the kit comprises any of the disclosed self-replicating RNA molecules and any of the disclosed Ad26 viruses. In some embodiments, the kit comprises one or more of the disclosed polynucleotides. In some embodiments, the kit comprises one or more of the disclosed polypeptides. In some embodiments, the kit comprises one or more of the disclosed vectors. In some embodiment, the kit comprises one or more of the disclosed cells.

### Prostate Neoantigen/HLA Complexes

[0850] Also provided herein is a protein complex comprising a prostate neoantigen and HLA. Also provided is a protein complex comprising a fragment of the prostate neoantigen and HLA. Also provided is a protein complex comprising a variant of the prostate neoantigen and HLA. Also provided is a protein complex comprising a variant of a fragment of the prostate neoantigen and HLA.

[0851] In some embodiments, the prostate neoantigen comprises the polypeptide of SEQ ID NOs: 1, 3, 5, 7, 9, 11, 13, 15, 17, 19, 21, 23, 25, 27, 29, 31, 33, 35, 37, 39, 41, 43, 45, 47, 49, 51, 53, 55, 57, 59, 61, 63, 65, 67, 69, 71, 73, 75, 77, 79, 81, 83, 85, 87, 89, 91, 93, 95, 97, 99, 101, 103, 105, 107, 109, 111, 113, 115, 117, 119, 121, 123, 125, 127, 129, 131, 133, 135, 137, 139, 141, 143, 145, 147, 149, 151, 153, 155, 157, 159, 161, 163, 165, 167, 169, 171, 173, 175, 177, 179, 181, 183, 185, 187, 189, 191, 193, 195, 197, 199, 201, 203, 205, 207, 209, 211, 213, 215, 217, 219, 221, 223, 225, 227, 229, 231, 233, 235, 237, 239, 241, 243, 245, 247, 249, 251, 253, 255, 257, 259, 261, 263, 265, 267, 269, 271, 273, 275, 277, 279, 281, 283, 285, 287, 289, 291, 293, 295, 297, 299, 301, 303, 305, 307, 309, 311, 313, 315, 317, 319, 321, 323, 325, 327, 329, 331, 333, 335, 337, 339, 341, 343, 345, 347, 349, 351, 353, 355, 357, 359, 361, 363, 365, 367, 369, 371, 373, 375, 379, 381, 383, 385, 387, 388, 389, 390, 391, 392, 393, 394, 395, 396, 397, 398, 399, 400, 401, 402, 403, 404, 405, 406, 407, 408, 426, 427, 428, 429, 430, 431, 432, 433, 434, 435, 436, 437, 438, 439, 440, 441, 442, 443, 444, 445, 446, 447, 1001, or 1003.

[0852] In some embodiments, HLA is class I HLA. In some embodiments, HLA is class II HLA. In some embodiments, HLA is HLA-A. In some embodiments, HLA is HLA-B. In some embodiments, HLA is HLA-C. In some embodiments, HLA is HLA-DP. In some embodiments, HLA is HLA-DQ. In some embodiments, HLA is HLA-DR. In some embodiments, HLA is HLA-A*01:01, A*02:01, A*03:01, A*24:02, B*07:02 or B*08:01.

[0853] The complex of the prostate neoantigen and HLA may be used to for example isolate cognate T cells in vitro or in vivo. The complex of the prostate neoantigen and HLA may also be conjugated to a detectable label and used as a detection agent to detect, visualize or isolate cognate TCR or T cells expressing the cognate TCR. The complex of the prostate neoantigen and HLA may also be conjugated to a cytotoxic agent and used to deplete or reduce the number of cells expressing the cognate TCR. The complex may be in its native configuration or alternatively the prostate neoantigen and/or the HLA may be engineered.

### EXAMPLES

[0854] The following examples are provided to further describe some of the embodiments disclosed herein. The examples are intended to illustrate, not to limit, the disclosed embodiments.

### Example 1. General Methods

### Peptide Synthesis

[0855] Peptides were synthesized by New England Peptide with purity >80%. The lyophilized peptides were solubilized in 100% DMSO.

### Immunogenicity

[0856] The immunogenicity of a heterologous protein or peptide can be determined by a number of assays known to persons of ordinary skill, for example immunostaining of intracellular cytokines or secreted cytokines by epitope-specific T-cell populations, or by quantifying frequencies and total numbers of epitope-specific T-cells and characterizing their differentiation and activation state, e.g. short-lived effector and memory precursor effector CD8+ T-cells Immunogenicity can also be determined by measuring an antibody-mediated immune response, e.g. the production of antibodies by measuring serum IgA or IgG titers.

### In Vitro Immunogenicity Assessment of Neoantigens (“Patient PBMC Restimulation Assay”)

[0857] PBMCs from human patients with metastatic castrate-resistant prostate cancer were thawed using media (RPMI 1640 supplemented with Glutamax, 10% HI FBS, and 1× Sodium Pyruvate). Cells were counted and plated in a 96 well round bottom microplate at a concentration of 250,000 viable cells per well. Lyophilized peptides were solubilized in 100% DMSO and diluted in media to 10 μg/mL. Neoantigen peptides were added in equal volume to PBMCs for a final concentration of 5 μg/mL. CEF Peptide Pool “Plus” (Cellular Technologies, Ltd.) was utilized as a positive control and DMSO at the same final concentration as the experimental peptides was utilized as a negative control. Human IL-15 (Peprotech) was added to all wells at final concentration of 10 ng/mL.

[0858] Plates were incubated at 37° C. (5% CO₂) for a total of 13 days. Media was refreshed every 2 days with IL-15 (10 ng/mL final concentration) and IL-2 (R&D systems, 10 IU/mL final concentration). On day 12, PBMCs were re-stimulated with identical experimental peptides or controls, at same concentration as peptide stimulation on Day 1. After 1-hour incubation, protein Inhibitor Cocktail (eBioscience) was added to every well and plate was incubated overnight.

[0859] On day 13, cells were stained for intracellular flow cytometry analysis. The cells were washed with PBS and stained with Live/Dead Fixable Aqua Dead Cell stain (Thermo-Fisher). Following the live/dead stain, cells were blocked using Biotin-Free Fc Receptor Blocker (Accurate Chemical & Scientific Corp). Extracellular cellular flow panel (1 μL/antibody per well in 50 μL) consisted of CD3 PerCP-Cy5.5 (Biolegend), CD4 BV421 (Biolegend), and CD8 APC-Cy7 (Biolegend). After extracellular staining, cells were fixed using Foxp3/Transcription Factor Staining Buffer Set (eBioscience) and stained for intracellular proteins (1:50 dilution) using TNFα FITC (R&D Systems) and IFNγ BV785 (Biolegend). Cells were washed and resuspended in stain buffer and analyzed using a BD Celesta flow cytometer.

[0860] Flow cytometry cell staining analysis was completed using FlowJo v10. Cells were gated on live, singlet, CD3+ cells. The CD8⁺ T cells were analyzed for TNFα/IFNγ expression and the frequency of double positive TNFα/IFNγ CD8⁺ T cells was recorded. Responses were assessed to be positive when the frequency of double positive TNFα/IFNγ CD8+ T cells due to stimulation with an experimental peptide was increased greater than or equal to 2-fold over the DMSO only negative control for that patient. Peptides were analyzed in 1 to 7 patient samples.

### In Vitro Immunogenicity Assessment of Neoantigens (“Exogenous Autologous Normal Donor Restimulation Assay”)

[0861] CD1c+ Dendritic Cells (DC) isolated from human normal PBMCs were thawed using media (IMDM (Gibco) supplemented with glutamine, HEPES, 5% human serum (Sigma), and 1× Pen-Strep). DC cells were resuspended in media supplemented with IL-4 (Peprotech, 80 ng/mL) and GM-CSF (Gibco, 80 ng/mL), plated in 6 well microplates, and rested overnight at 37° C. (5% CO₂). The following day, DC cells were counted and plated in a 96 well round bottom microplate at a concentration of 30,000 viable cells per well. Lyophilized peptides (15-mer overlapping peptides) were solubilized in 100% DMSO and pooled by neoantigen to between 5 mg/mL and 20 mg/mL. Neoantigen peptides pools were added to DCs for a final concentration of 2.5 μg/mL to 10 μg/mL and rested for 2 hours at 37° C. (5% CO₂). CEF Peptide Pool “Plus” (Cellular Technologies, Ltd.) was utilized as a positive control and DMSO at the same final concentration as the experimental peptides was utilized as a negative control. After 2 hours, DC cells were irradiated with 50 gray of ionizing radiation. Autologous CD3+ Pan-T cells isolated from human normal PBMCs were thawed using media. Following irradiation, autologous Pan-T cells were added to the irradiated DCs at 300,000 viable cells per well. Human IL-15 (Peprotech) was added to all wells at final concentration of 10 ng/mL.

[0862] Plates were incubated at 37° C. (5% CO₂) for a total of 12 days. Media was refreshed every 2-3 days with IL-15 (10 ng/mL final concentration) and IL-2 (R&D systems, 10 IU/mL final concentration). On day 11 cells were re-stimulated with identical experimental peptide pools or controls, at same concentration as peptide stimulation on Day 1. Protein Inhibitor Cocktail (eBioscience) was added to every well and plate was incubated overnight at 37° C. (5% CO₂).

[0863] On day 12, cells were stained for intracellular flow cytometry analysis. The cells were washed with PBS and stained with Live/Dead Fixable Aqua Dead Cell stain (Thermo-Fisher). Following the live/dead stain, cells were blocked using Biotin-Free Fc Receptor Blocker (Accurate Chemical & Scientific Corp). Extracellular cellular flow panel (1 μL/antibody per well in 50 μL) consisted of CD3 PerCP-Cy5.5 (Biolegend), CD4 BV421 (Biolegend), and CD8 APC-Cy7 (Biolegend). After extracellular staining, cells were fixed using Foxp3/Transcription Factor Staining Buffer Set (eBioscience) and stained for intracellular proteins (1:50 dilution) using TNFα FITC (R&D Systems) and IFNγ BV785 (Biolegend). Cells were washed and resuspended in stain buffer and analyzed using a BD Celesta flow cytometer.

[0864] Flow cytometry cell staining analysis was completed using FlowJo v10. Cells were gated on live, singlet, CD3+ cells. The CD8+ and CD4⁺ T cells were analyzed for TNFα/IFNγ expression and the frequency of double positive TNFα/IFNγ CD8+ and the frequency of double positive TNFα/IFNγ CD4⁺ T cells were recorded. Responses were assessed to be positive when the frequency of double positive TNFα/IFNγ CD8+ or TNFα/IFNγ CD4⁺ T cells due to stimulation with an experimental peptide pool was increased greater than or equal to 3-fold over the DMSO only negative control for that donor and at least 0.01%.

### In Vitro Endogenous Immunogenicity Assessment of Neoantigens (“Endogenous Autologous Normal Donor Restimulation Assay”)

[0865] CD1c+ Dendritic Cells (DC) isolated from human normal PBMCs were thawed using media (IMDM (Gibco) supplemented with glutamine, HEPES, 5% human serum (Sigma), and 1× Pen-Strep). DC cells were resuspended in media supplemented with IL-4 (Peprotech, 80 ng/mL) and GM-CSF (Gibco, 80 ng/mL), plated in 6 well microplates, and rested overnight at 37° C. (5% CO₂). The following day, DC cells were counted and plated in a 96 well round bottom microplate at a concentration of 30,000 viable cells per well. Ad5 vectors (Vector Biolabs) were dilute in media to an MOI (Multiplicity Of Infection) of 5000 based on Plaque Forming Units. Ad5 vectors for the CEF pool and a “null” were used as controls. DCs were transduced with Ad5 vectors overnight at 37° C. (5% CO₂). The following day, the Ad5 vectors were washed off the plate by three sequential centrifugation/aspiration steps using sterile Phosphate Buffered Saline. After the final wash, transduced DCs were resuspended in 100 μL media. Autologous CD3+ Pan-T cells isolated from human normal PBMCs were thawed using media. Pan-T cells were added to the irradiated DCs at 300,000 viable cells per well (100 μL/well). Human IL-15 (Peprotech) was added to all wells at final concentration of 10 ng/mL.

[0866] Plates were incubated at 37° C. (5% CO₂) for a total of 12 days. Media was refreshed every 2-3 days with IL-15 (10 ng/mL final concentration) and IL-2 (R&D systems, 10 IU/mL final concentration). On day 11 lyophilized peptides (15-mer overlapping peptides) were solubilized in 100% DMSO and pooled by neoantigen to between 5 mg/mL and 20 mg/mL. Neoantigen peptides pools were added to cells for a final concentration of 2.5 μg/mL to 10 μg/mL. CEF Peptide Pool “Plus” (Cellular Technologies, Ltd.) was utilized as a positive control and DMSO at the same final concentration as the experimental peptides was utilized as a negative control. Protein Inhibitor Cocktail (eBioscience) was added to every well and plate was incubated overnight at 37° C. (5% CO₂).

[0867] On day 12, cells were stained for intracellular flow cytometry analysis. The cells were washed with PBS and stained with Live/Dead Fixable Aqua Dead Cell stain (Thermo-Fisher). Following the live/dead stain, cells were blocked using Biotin-Free Fc Receptor Blocker (Accurate Chemical & Scientific Corp). Extracellular cellular flow panel (1 μL/antibody per well in 50 μL) consisted of CD3 PerCP-Cy5.5 (Biolegend), CD4 BV421 (Biolegend), and CD8 APC-Cy7 (Biolegend). After extracellular staining, cells were fixed using Foxp3/Transcription Factor Staining Buffer Set (eBioscience) and stained for intracellular proteins (1:50 dilution) using TNFα FITC (R&D Systems) and IFNγ BV785 (Biolegend). Cells were washed and resuspended in stain buffer and analyzed using a BD Celesta flow cytometer.

[0868] Flow cytometry cell staining analysis was completed using FlowJo v10. Cells were gated on live, singlet, CD3+ cells. The CD8+ and CD4⁺ T cells were analyzed for TNFα/IFNγ expression and the frequency of double positive TNFα/IFNγ CD8+ and the frequency of double positive TNFα/IFNγ CD4⁺ T cells were recorded. Responses were assessed to be positive when the frequency of double positive TNFα/IFNγ CD8+ or TNFα/IFNγ CD4⁺ T cells due to stimulation with an experimental peptide pool was increased greater than or equal to 3-fold over the DMSO only negative control for that donor and at least 0.01%.

### In Vitro Binding of Neoantigens to Class I MHC

[0869] The 9 mer peptides identified by bioinformatics analysis were analyzed for their binding propensities to 6 common HLA class I alleles (HLA-A*01:01, A*02:01, A*03:01, A*24:02, B*07:02, B*08:01). The principle of the method is briefly described below and consists of two parts, one involving exchange of peptide with a positive control induced by Ultraviolet (UV) radiation, and the second is an enzyme immunoassay to detect stable HLA-peptide and empty HLA complexes.

[0870] HLA-bound peptides are critical for the stability of the HLA complex. A conditional HLA class I complex was stabilized by an UV-labile peptide utilizing a different peptide (Pos) for each HLA (Pos: HLA-A*01:01: CTELKLSDY (SEQ ID NO: 409), HLA-A*02:01: NLVPMVATV (SEQ ID NO: 410), HLA-A*03:01: LIYRRRLMK (SEQ ID NO: 411), HLA-A*24:02: LYSACFWWL (SEQ ID NO: 412), HLA-B*07:02: NPKASLLSL (SEQ ID NO: 413), HLA-B*08:01: ELRSRYWAI (SEQ ID NO: 414), which could be cleaved by UV irradiation when bound to the HLA molecule. Upon cleavage, the resulting peptide fragments dissociated from the HLA class I complex since their length was insufficient to bind stably to HLA. Under the conditions in which peptide cleavage was performed (neutral pH, on melting ice), the peptide-free HLA complex remained stable. Thus, when cleavage was performed in the presence of another HLA class I peptide of choice, this reaction resulted in net exchange of the cleaved UV-labile peptide Pos with the chosen peptide (Rodenko, B et al. (2006) Nature Protocols 1: 1120-32, Toebes, M et al. (2006) Nat Med 12: 246-51, Bakker, A H et al. (2008) Proc Natl Acad Sci USA 105: 3825-30).

[0871] The exchange efficiency between the peptide of interest and Pos was analyzed using an HLA class I ELISA. The combined technologies allowed the identification of ligands for an HLA molecule of interest which are potentially immunogenic.

[0872] Exchange control peptide Pos was a high affinity binder to the relevant HLA class I allele while exchange control peptide Neg was a non-binder. The UV control represented UV-irradiation of conditional HLA class I complex in the absence of a rescue peptide. The binding of exchange control peptide Neg (HLA-A*01:01: NPKASLLSL (SEQ ID NO: 413), HLA-A*02-01: IVTDFSVIK (SEQ ID NO: 416), HLA-A*03:01: NPKASLLSL (SEQ ID NO: 413), HLA-A*24:02: NLVPMVATV (SEQ ID NO: 410), HLA-B*07:02: LIYRRRLMK (SEQ ID NO: 411), HLA-B*08:01: NLVPMVATV (SEQ ID NO: 410) and all experimental peptides were evaluated relative to that of exchange control peptide Pos. The absorption of the latter peptide was set at 100%. This procedure resulted in a range of different exchange percentages that reflected the affinities of the different experimental peptides for the HLA allele used.

[0873] The HLA class I ELISA is an enzyme immunoassay based on the detection of beta2-microglobulin (B2M) of (peptide-stabilized) HLA class I complexes. To this end streptavidin was bound onto polystyrene microtiter wells. After washing and blocking, HLA complex present in exchange reaction mixtures or ELISA controls was captured by the streptavidin on the microtiter plate via its biotinylated heavy chain Non-bound material was removed by washing. Subsequently, horseradish peroxidase (HRP)-conjugated antibody to human B2M was added. The HRP-conjugated antibody binds only to an intact HLA complex present in the microtiter well because unsuccessful peptide exchange results in disintegration of the original UV-sensitive HLA complex upon UV illumination. In the latter case B2M was removed during the washing step. After removal of non-bound HRP conjugate by washing, a substrate solution was added to the wells. A coloured product formed in proportion to the amount of intact HLA complex present in the samples. After the reaction was terminated by the addition of a stop solution, absorbance was measured in a microtiter plate reader. The absorbance was normalized to the absorbance of an exchange control peptide (represents 100%). Suboptimal HLA binding of peptides with a moderate to low affinity for HLA class I molecules can also be detected by this ELISA technique (Rodenko, B et al. (2006) Nature Protocols 1: 1120-32).

[0874] Peptides that had 10% or greater exchange efficiency in one of the 6 HLA alleles were considered for further immunogenicity testing and analysis.

### Example 2. Identification of Neoantigens by Bioinformatics

[0875] A computational framework was developed to analyze various prostate cancer RNA-seq datasets by bioinformatics means to identify common prostate cancer neoantigens resulting from aberrant transcriptional programs such as gene fusion events, intron retention, alternatively spliced variants and aberrant expression of developmentally silenced genes.

[0876] The datasets queried were:
[0877] The Genotype-Tissue Expression (GTEx) Consortium. This dataset encompasses 6137 RNA-seq datasets from 49 normal tissues and was used to annotate RNA features in normal tissues and assess frequency of potential prostate neoantigen candidates in normal tissue.
[0878] The Cancer Genome Atlas Prostate Adenocarcinoma (TCGA PRAD) (Cancer Genome Atlas Research Network. Cell. 2015 Nov. 5; 163(4):1011-25. doi: 10.1016/j.cell.2015.10.025). This dataset encompasses RNA-seq datasets from 508 prostate cancer subjects and was used to identify neoantigen candidates in localized prostate adenocarcinoma.
[0879] Stand Up To Cancer (SU2C) (Robinson D et al., Cell. 2015 May 21; 161(5):1215-1228. doi: 10.1016/j.cell.2015.05.001). This dataset encompasses RNA-seq datasets from 43 mCRPC subjects.

[0880] Quality control (QC) of raw data was conducted prior to analysis. Sequencing reads were first trimmed to remove Illumina's adapter sequences and reads mapping to human tRNA and rRNA were removed from downstream analysis. Reads were also trimmed of bases with poor base quality score (<10, PHRED scale; indicating a base with a 1 in 10 probability of being incorrect) at either ends. PHRED quality score measures the quality of the identification of the bases generated by automated DNA sequencing instruments. Trimmed reads with less than 25 bps were removed from the datasets. Additionally, following QC steps were considered to remove poor quality reads: remove reads having maximal base quality PHRED score of <15, remove reads with average base quality PHRED score of <10, remove reads having polyATCG rate >80%, remove RNA sequences in which one of the two reads failed.

[0881] Reads that passed the QC criteria were mapped to Human Genome Build 38 using ArrayStudio ((https_//www_omicsoft_com/array-studio/) platform. Refseq gene model (release date Jun. 6, 2017) was used for annotation of novel RNA features.

[0882] The results published here are in whole or part based upon data generated by The Cancer Genome Atlas managed by the NCI and NHGRI. Information about TCGA can be found at http://_cancergenme_nih_gov.

### Identification of Gene Fusion Events

[0883] FusionMap algorithm (Ge H et al., Bioinformatics. 2011 Jul. 15; 27(14):1922-8. doi: 10.1093/bioinformatics/btr310. Epub 2011 May 18) was used to identify gene fusion events in the prostate cancer datasets described above. FusionMap detects fusion junctions based on seed reads which contain the fusion breakpoint position in the middle region of the reads. The algorithm dynamically creates a pseudo fusion transcript/sequence library based on the consensus of mapped fusion junctions from the seed reads. FusionMap then aligns unmapped possible fusion reads to the pseudo fusion reference to further identify rescued reads. The program reports a list of detected fusion junctions, statistics of supporting reads, fusion gene pairs, as well as genomic locations of breakpoints and junction sequences, which characterize fusion genes comprehensively at base-pair resolution.

[0884] Neoantigens originating from chimeric read-through fusions as shown in FIG. 1 and fusions resulting from chromosomal alterations as shown in FIG. 2 were identified using FusionMap. Neoantigens were classified as originating from gene fusion events when following criteria were met: fusion junction was supported by at least two seed reads with different mapping positions in the genome, at least 4 sequencing reads (seed and rescued reads) parsing the junction, and at least one junction spanning read. The prevalence of neoantigens were queried in tumor tissue and normal tissue using the datasets mentioned above. Neoantigens were identified as common when the prevalence was identified to be >10% in at least one disease cohort (TCGA and SU2C) and <2% in normal tissue (6137 RNA-seq datasets from 49 normal tissues). Gene fusion events with less than 10% prevalence in disease cohort were included if they generated long stretches of novel peptide sequences or were present in genes of interest.

### Identification of Splice Variants

[0885] A custom bioinformatic software was developed to analyze paired-end RNA-seq data to identify potential neoantigens arising from alternative splicing events. Utilizing the developed process, splice variants with alternative 5′ or 3′ splice sites, retained introns, excluded exons, alternative terminations or insertion(s) of novel cassettes as show in in FIG. 3 were identified. The process identified splice variants that were not present in the RefSeq gene model through two main functionalities: 1) Identification of novel junctions based on reads with gaps of 6 or more bp and sequences of at least 15 bp aligned on each side of the gap, henceforth referred to as split-mapped reads. Novel junctions were reported if they were represented by at least 5 split-mapped reads and one mate pair of reads flanking the junction on each end. 2) Identification of islands of aligned reads, henceforth referred to as coverage islands. Further details on parameters used for determining island boundaries are described below. FIG. 4 shows the cartoon of the approach.

[0886] In order to differentiate reads mapping to intronic regions due to true splicing variation as opposed to genomic DNA and/or pre-mRNA contamination, two parameters were developed to establish the distribution of contamination across 200 highly expressed housekeeping genes. The tail ends of these distributions were then used as cut-offs for discovery of novel splice variants where relevant.
[0887] 1. Intron depth of coverage (IDC): 90^{th} percentile depth of coverage for all housekeeping intronic bases. If the coverage of a particular region fell below this value, the first base where this occurred was defined as a coverage island boundary.
[0888] 2. Intron/exon coverage ratio (IECR): 90^{th} percentile of the ratio between median intron coverage and median coverage of the nearest upstream exon of all housekeeping gene introns

[0889] All reported splice variants were required to meet the following criteria:

[0890] Alternative 3′/5′ Splice Site Identification:
[0891] Novel splice site was supported by at least 5 split-mapped reads and one mate pair of reads flanking the junction
[0892] Intronic region resulting from using the splice site (if applicable) exceeded IECR and entire region exceeded IDC

[0893] Novel Cassette Identification:
[0894] Two novel splice sites in an intronic region were supported by at least 5 split-mapped reads and one mate pair of reads flanking the junction
[0895] Region between the two splice sites exceeded IECR and entire region exceeded IDC

[0896] Intron Retention Identification:
[0897] Intronic region exceeded IECR and entire region exceeded IDC
[0898] At least 5 reads span both intron-exon boundaries, with at least 15 bp aligned on each side of the boundaries

[0899] Alternative Termination Identification:
[0900] 3′ boundary defined as the edge of a coverage island that did not fall within 60 bp of the 3′ end of a canonical exon
[0901] Any intronic regions between 5′ end of a canonical exon and the 3′ boundary exceeded IECR and entire region exceeded IDC

[0902] Exon Exclusion Identification:
[0903] Novel junction was supported by at least 5 split-mapped reads and one mate pair of reads flanking the junction where one or more canonical exons were skipped

[0904] Neoantigens derived from aberrant splicing events were identified as common when the incidence was identified to be about >10% in disease cohort (TCGA and SU2C datasets) and about <1% in normal tissue (GTEx Consortium dataset).

### Identification of DNA Mutations (Point and Frameshift) Based Neoantigens

[0905] The TCGA, SU2C and the integrated DFCI/Sloane Kettering datasets (Integrated DFCl/Sloane Kettering dataset (Armenia et al., Nat Genet. 2018 May; 50(5):645-651. doi: 10.1038/s41588-018-0078-z. Epub 2018 Apr. 2) as described above containing exome sequencing data from patients with prostate cancer were examined. Mutation calls published by the consortia that generated these datasets were downloaded, and gene mutations that were present in >10% of the patient population or in genes known to be drivers of prostate cancer (such as AR) were identified. For each single point mutation chosen, a 17 mer peptide with the mutated amino acid at its center was identified for further validation studies.

### Splicing Isoform Prediction

[0906] In certain cases, there were multiple reading frames and exons upstream of the identified splicing events that could impact the canonical peptide sequence preceding the neoepitope sequence. In these genes, it was determined which canonical exons neighbored each neoepitope feature based on the split-mapped reads present at the exon boundaries. The most highly expressed isoform with the highest average expression in the disease cohort with the highest prevalence of the event that could contain the predicted neoepitope was chosen for translation into the corresponding protein by choice of the open reading frame associated with the isoform. The neoepitope portion of the protein sequence was extracted, with an additional 8 amino acid residues upstream of the first altered amino acid included and used for subsequent validation studies. A similar procedure was followed to identify putative immunogenic antigens from DNA frameshift alterations. For both frameshift deletions and insertions, the resulting DNA sequence was translated into the corresponding protein by choice of the appropriate open reading frame, and the frameshift altered portion of the protein sequence was extracted, with an additional 8 amino acid residues upstream of the first altered amino acid included.

[0907] Table 1 shows the gene origin, the specific mutation, the amino acid sequences of identified neoantigens with single amino acid mutations (M) and frequency in patients. Each mutation is bolded in Table 1. Table 2 shows their corresponding polynucleotide sequences. The mutant sequences are capitalized in Table 2. Patient frequency (%) in Table 1 was obtained from Armenia et al., Nat Genet 50(5): 645-651, 2018.

TABLE 1

| | | | Patient | | SEQ |
|---|---|---|---|---|---|
| Neoepitope | | | Frequency | | ID |
| ID | Gene | Mutation | (%) | Amino acid sequence | NO: |
| M1 | TP53 | R248Q | 1.0859 | SSCMGGMNQRPILTIIT | 1 |
| M2 | TP53 | R248W | 0.0987 | SSCMGGMNWRPILTIIT | 3 |
| M3 | TP53 | R273C | 0.6910 | LGRNSFEVCVCACPGRD | 5 |
| M4 | TP53 | R273L | 0.3949 | LGRNSFEVLVCACPGRD | 7 |
| M5 | TP53 | G245S | 0.6910 | MCNSSCMGSMNRRPILT | 9 |
| M6 | TP53 | Y220C | 0.4936 | FRHSVVVPCEPPEVGSD | 11 |
| M7 | TP53 | R282W | 0.4936 | VCACPGRDWRTEEENLR | 13 |
| M8 | SPOP | F133C | 0.5923 | FVQGKDWGCKKFIRRDF | 15 |
| M9 | SPOP | F133I | 0.3949 | FVQGKDWGIKKFIRRDF | 17 |
| M10 | SPOP | F133L | 1.1846 | FVQGKDWGLKKFIRRDF | 19 |
| Mll | SPOP | F133S | 0.3949 | FVQGKDWGSKKFIRRDF | 21 |
| M12 | SPOP | F133V | 0.9872 | FVQGKDWGVKKFIRRDF | 23 |
| M13 | SPOP | W131C | 0.0987 | YRFVQGKDCGFKKFIRR | 25 |
| M14 | SPOP | W131G | 1.2833 | YRFVQGKDGGFKKFIRR | 27 |
| M15 | SPOP | W131L | 0.1974 | YRFVQGKDLGFKKFIRR | 29 |
| M16 | SPOP | W131R | 0.1974 | YRFVQGKDRGFKKFIRR | 31 |
| M17 | SPOP | W131S | 0.0987 | YRFVQGKDSGFKKFIRR | 33 |
| M18 | KMT2D | R5214H | 0.1974 | YPVGYEATHIYWSLRTN | 35 |
| M19 | FOXA1 | R261C | 0.1974 | MFENGCYLCRQKRFKCE | 37 |
| M20 | FOXA1 | H247Q | 0.1974 | GKGSYWTLQPDSGNMFE | 39 |
| M21 | FOXA1 | H247L | 0.0987 | GKGSYWTLLPDSGNMFE | 41 |
| M22 | FOXA1 | H247N | 0.0987 | GKGSYWTLNPDSGNMFE | 43 |
| M23 | FOXA1 | H247Y | 0.0987 | GKGSYWTLYPDSGNMFE | 45 |
| M24 | FOXA1 | F266C | 0.0987 | CYLRRQKRCKCEKQPGA | 47 |
| M25 | FOXA1 | F266S | 0.0987 | CYLRRQKRSKCEKQPGA | 49 |
| M26 | FOXA1 | D226G | 0.0987 | IRHSLSFNGCFVKVARS | 51 |
| M27 | FOXA1 | D226N | 0.1974 | IRHSLSFNNCFVKVARS | 53 |
| M28 | FOXA1 | R219C | 0.0987 | QQRWQNSICHSLSFNDC | 55 |
| M29 | FOXA1 | R219S | 0.1974 | QQRWQNSISHSLSFNDC | 57 |
| M30 | FOXA1 | M253K | 0.1974 | TLHPDSGNKFENGCYLR | 59 |
| M31 | FOXA1 | M253R | 0.0987 | TLHPDSGNRFENGCYLR | 61 |
| M32 | CDK12 | R858W | 0.1974 | CHKKNFLHWDIKCSNIL | 63 |
| M33 | PTEN | R130Q | 0.2962 | IHCKAGKGQTGVMICAY | 65 |
| M34 | PTEN | V119F | 0.1974 | WLSEDDNHFAAIHCKAG | 67 |
| M35 | ATM | N2875S | 0.0987 | GLGDRHVQSILINEQSA | 69 |
| M36 | ATM | N2875K | 0.0987 | GLGDRHVQKILINEQSA | 71 |
| M37 | KDM6A | C1164S | 0.0987 | NINIGPGDSEWFVVPEG | 73 |
| M38 | KDM6A | C1164Y | 0.0987 | NINIGPGDYEWFVVPEG | 75 |
| M39 | PIK3CA | H1047R | 0.4936 | FMKQMNDARHGGWTTKM | 77 |
| M40 | PIK3CA | E545K | 0.2962 | RDPLSEITKQEKDFLWS | 79 |
| M41 | PIK3CA | E545G | 0.0987 | RDPLSEITGQEKDFLWS | 81 |
| M42 | PIK3CA | E545A | 0.0987 | RDPLSEITAQEKDFLWS | 83 |
| M43 | CTNNB1 | T41A | 0.4936 | SGIHSGATATAPSLSGK | 85 |
| M44 | CTNNB1 | D32A | 0.0987 | HWQQQSYLASGIHSGAT | 87 |
| M45 | CTNNB1 | D32H | 0.0987 | HWQQQSYLHSGIHSGAT | 89 |
| M46 | CTNNB1 | D32V | 0.0987 | HWQQQSYLVSGIHSGAT | 91 |
| M47 | CTNNB1 | D32Y | 0.1974 | HWQQQSYLYSGIHSGAT | 93 |
| M48 | CTNNB1 | S37A | 0.0987 | SYLDSGIHAGATTTAPS | 95 |
| M49 | CTNNB1 | S37C | 0.0987 | SYLDSGIHCGATTTAPS | 97 |
| M50 | CTNNB1 | S37F | 0.0987 | SYLDSGIHFGATTTAPS | 99 |
| M51 | CTNNB1 | S37Y | 0.0987 | SYLDSGIHYGATTTAPS | 101 |
| M52 | CTNNB1 | S45C | 0.0987 | SGATTTAPCLSGKGNPE | 103 |
| M53 | CTNNB1 | S45F | 0.0987 | SGATTTAPFLSGKGNPE | 105 |
| M54 | CTNNB1 | S45P | 0.0987 | SGATTTAPPLSGKGNPE | 107 |
| M55 | COL5A1 | T348K | 0.1974 | YVPSEDYYKPSPYDDLT | 109 |
| M56 | TAF1L | A869T | 0.1974 | IRKRLKLCTDFKRTGMD | 111 |
| M57 | MED12 | L1224F | 0.7897 | VDGAVFAVFKAVFVLGD | 113 |
| M58 | MED12 | V1223G | 0.0987 | IVDGAVFAGLKAVFVLG | 115 |
| M59 | MED12 | V1223L | 0.0987 | IVDGAVFALLKAVFVLG | 117 |
| M60 | MGA | R2435W | 0.1974 | THTANERRWRGEMRDLF | 119 |
| M61 | ARID1A | P1756R | 0.1974 | GRFSKVSSRAPMEGGEE | 121 |
| M62 | CUL3 | M299R | 0.4936 | GKTEDLGCRYKLFSRVP | 123 |
| M63 | USP7 | Q4H | 0.4936 | MNHHQQQQQQKA | 125 |
| M64 | SF3B1 | K700E | 0.1974 | HGLVDEQQEVRTISALA | 127 |
| M65 | U2AF1 | S34F | 0.2962 | VCRHGDRCFRLHNKPTF | 129 |
| M66 | CDC27 | Y73C | 0.1974 | SCTTPQCKCLLAKCCVD | 131 |
| M67 | CDC27 | N260H | 0.1974 | SILSKQVQHKPKTGRSL | 133 |
| M68 | BRAF | G469A | 0.2962 | QRIGSGSFATVYKGKWH | 135 |
| M69 | BRAF | K601E | 0.1974 | GDFGLATVESRWSGSHQ | 137 |
| M70 | RAG1 | R112C | 0.0987 | QANLRHLCCICGNSFRA | 139 |
| M71 | RAG1 | R112H | 0.1974 | QANLRHLCHICGNSFRA | 141 |
| M72 | CNOT3 | E20K | 0.3949 | DRCLKKVSKGVEQFEDI | 143 |
| M73 | CNOT3 | E70K | 0.2962 | IKTWVASNKIKDKRQLI | 145 |
| M74 | PIK3CB | E1051K | 0.2962 | QKFDEALRKSWTTKVNW | 147 |
| M75 | IDH1 | R132C | 0.1974 | WVKPIIIGCHAYGDQYR | 149 |
| M76 | IDH1 | R132G | 0.0987 | WVKPIIIGGHAYGDQYR | 151 |
| M77 | IDH1 | R132H | 0.4936 | WVKPIIIGHHAYGDQYR | 153 |
| M78 | KRAS | G12D | 0.1974 | YKLVVVGADGVGKSALT | 155 |
| M79 | KRAS | G12R | 0.2962 | YKLVVVGARGVGKSALT | 157 |
| M80 | KRAS | Q61K | 0.2962 | LDILDTAGKEEYSAMRD | 159 |
| M81 | KRAS | Q61L | 0.0987 | LDILDTAGLEEYSAMRD | 161 |
| M82 | KRAS | Q61R | 0.0987 | LDILDTAGREEYSAMRD | 163 |
| M83 | AKT1 | E17K | 0.4936 | EGWLHKRGKYIKTWRPR | 165 |
| M84 | AR | T878A | 1.2833 | IARELHQFAFDLLIKSH | 167 |
| M85 | AR | T878G | 0.0987 | IARELHQFGFDLLIKSH | 169 |
| M86 | AR | L702H | 1.0859 | QPDSFAALHSSLNELGE | 171 |
| M87 | AR | W742L | 0.1974 | QMAVIQYSLMGLMVFAM | 173 |
| M88 | AR | W742F | 0.0987 | QMAVIQYSFMGLMVFAM | 175 |

TABLE 2

| Neoepitope | | SEQ ID |
|---|---|---|
| ID | Polynucleotide sequence | NO: |
| M1 | agttcctgcatgggcggcatgaaccAgaggcccatcctcaccatcatcaca | 2 |
| M2 | agttcctgcatgggcggcatgaaTTggaggcccatcctcaccatcatcaca | 4 |
| M3 | ctgggacggaacagctttgaggtgTgtgtttgtgcctgtcctgggagagac | 6 |
| M4 | ctgggacggaacagctttgaggtgcTtgtttgtgcctgtcctgggagagac | 8 |
| M5 | atgtgtaacagttcctgcatgggcAgcatgaaccggaggcccatcctcacc | 10 |
| M6 | tttcgacatagtgtggtggtgccctGtgagccgcctgaggttggctctgac | 12 |
| M7 | gittgtgcctgtcctgggagagaTTggcgcacagaggaagagaatctccgc | 14 |
| M8 | tttgtgcaaggcaaagactggggatGcaagaaattcatccgtagagatttt | 16 |
| M9 | tttgtgcaaggcaaagactggggaAtcaagaaattcatccgtagagatttt | 18 |
| M10 | tttgtgcaaggcaaagactggggattAaagaaattcatccgtagagatttt | 20 |
| Mll | tttgtgcaaggcaaagactggggatCcaagaaattcatccgtagagatttt | 22 |
| M12 | tttgtgcaaggcaaagactggggaGtcaagaaattcatccgtagagatttt | 24 |
| M13 | tataggtttgtgcaaggcaaagactgTggattcaagaaattcatccgtaga | 26 |
| M14 | tataggtttgtgcaaggcaaagacGggggattcaagaaattcatccgtaga | 28 |
| M15 | tataggtttgtgcaaggcaaagactggggattcaagaaattcatccgtaga | 30 |
| M16 | tataggtttgtgcaaggcaaagacCggggattcaagaaattcatccgtaga | 32 |
| M17 | tataggtttgtgcaaggcaaagactCgggattcaagaaattcatccgtaga | 34 |
| M18 | tatcccgtgggctacgaggccacgcAcatctattggagcctccgcaccaac | 36 |
| M19 | atgttcgagaacggctgctacttgTgccgccagaagcgcttcaagtgcgag | 38 |
| M20 | ggcaagggctcctactggacgctgcaGccggactccggcaacatgttcgag | 40 |
| M21 | ggcaagggctcctactggacgctgcTcccggactccggcaacatgttcgag | 42 |
| M22 | ggcaagggctcctactggacgctgAacccggactccggcaacatgttcgag | 44 |
| M23 | ggcaagggctcctactggacgctgTacccggactccggcaacatgttcgag | 46 |
| M24 | tgctacttgcgccgccagaagcgctGcaagtgcgagaagcagccgggggcc | 48 |
| M25 | tgctacttgcgccgccagaagcgctCcaagtgcgagaagcagccgggggcc | 50 |
| M26 | atccgccactcgctgtccttcaatgGctgcttcgtcaaggtggcacgctcc | 52 |
| M27 | atccgccactcgctgtccttcaatAactgcttcgtcaaggtggcacgctcc | 54 |
| M28 | cagcagcgctggcagaactccatcTgccactcgctgtccttcaatgactgc | 56 |
| M29 | cagcagcgctggcagaactccatcAgccactcgctgtccttcaatgactgc | 58 |
| M30 | acgctgcacccggactccggcaacaAgttcgagaacggctgctacttgcgc | 60 |
| M31 | acgctgcacccggactccggcaacaGgttcgagaacggctgctacttgcgc | 62 |
| M32 | tgtcacaaaaagaatttcctgcatTgggatattaagtgttctaacattttg | 64 |
| M33 | attcactgtaaagctggaaagggacAaactggtgtaatgatatgtgcatat | 66 |
| M34 | tggctaagtgaagatgacaatcatTttgcagcaattcactgtaaagctgga | 68 |
| M35 | ggacttggtgatagacatgtacagaGtatcttgataaatgagcagtcagca | 70 |
| M36 | ggacttggtgatagacatgtacagaaAatcttgataaatgagcagtcagca | 72 |
| M37 | aacataaatattggcccaggtgactCtgaatggtttgttgttcctgaaggt | 74 |
| M38 | aacataaatattggcccaggtgactAtgaatggtttgttgttcctgaaggt | 76 |
| M39 | ttcatgaaacaaatgaatgatgcacGtcatggtggctggacaacaaaaatg | 78 |
| M40 | cgagatcctctctctgaaatcactAagcaggagaaagattttctatggagt | 80 |
| M41 | cgagatcctctctctgaaatcactgGgcaggagaaagattttctatggagt | 82 |
| M42 | cgagatcctctctctgaaatcactgCgcaggagaaagattttctatggagt | 84 |
| M43 | tctggaatccattctggtgccactGccacagctccttctctgagtggtaaa | 86 |
| M44 | cactggcagcaacagtcttacctggCctctggaatccattctggtgccact | 88 |
| M45 | cactggcagcaacagtcttacctgCactctggaatccattctggtgccact | 90 |
| M46 | cactggcagcaacagtcttacctggTctctggaatccattctggtgccact | 92 |
| M47 | cactggcagcaacagtcttacctgTactctggaatccattctggtgccact | 94 |
| M48 | tcttacctggactctggaatccatGctggtgccactaccacagctccttct | 96 |
| M49 | tcttacctggactctggaatccattGtggtgccactaccacagctccttct | 98 |
| M50 | tcttacctggactctggaatccattTtggtgccactaccacagctccttct | 100 |
| M51 | tcttacctggactctggaatccattAtggtgccactaccacagctccttct | 102 |
| M52 | tctggtgccactaccacagctccttGtctgagtggtaaaggcaatcctgag | 104 |
| M53 | tctggtgccactaccacagctccttTtctgagtggtaaaggcaatcctgag | 106 |
| M54 | tctggtgccactaccacagctcctCctctgagtggtaaaggcaatcctgag | 108 |
| M55 | tacgtgcccagtgaggactactacaAgccctcaccgtatgatgacctcacc | 110 |
| M56 | atccggaagaggctaaagctctgcActgacttcaaacgcacagggatggat | 112 |
| M57 | gtggatggagccgtgtttgctgttTtcaaggctgtgtttgtacttggggat | 114 |
| M58 | atcgtggatggagccgtgtagctgGtctcaaggctgtgtttgtacttggg | 116 |
| M59 | atcgtggatggagccgtgtttgctCttctcaaggctglgtttgtacttggg | 118 |
| M60 | acacacactgccaatgagcggcggTggcgtggtgaaatgagggatctcttt | 120 |
| M61 | gggaggttcagcaaggtgtctagtcGagctcccatggagggtggggaagaa | 122 |
| M62 | ggaaagacagaagaccttggttgcaGgtacaagttatttagtcgtgtgcca | 124 |
| M63 | atgaaccaccaCcagcagcagcagcagcagaaagcg | 126 |
| M64 | catggtcttgtggatgagcagcagGaagttcggaccatcagtgctttggcc | 128 |
| M65 | gcatgtcgtcatggagacaggtgctTtcggttgcacaataaaccgacgttt | 130 |
| M66 | agttgtactacaccgcaatgcaaatGcctgcttgcaaaatgttgtgttgat | 132 |
| M67 | tccatattatctaaacaggttcaaCataaaccaaaaactggtcgaagttta | 134 |
| M68 | caaagaattggatctggatcatttgCaacagtctacaagggaaagtggcat | 136 |
| M69 | ggtgattttggtctagctacagtgGaatctcgatggagtgggtcccatcag | 138 |
| M70 | caagccaaccttcgacatctctgcTgcatctgtgggaattcttttagagct | 140 |
| M71 | caagccaaccttcgacatctctgccAcatctgtgggaattcttttagagct | 142 |
| M72 | gatcgctgcctcaagaaggtgtccAagggcgtggagcagtttgaagatatt | 144 |
| M73 | atcaagacatgggtagcgtccaacAagatcaaggacaagaggcagcttata | 146 |
| M74 | caaaaatttgatgaggcgctcaggAaaagctggactactaaagtgaactgg | 148 |
| M75 | tgggtaaaacctatcatcataggtTgtcatgcttatggggatcaatacaga | 150 |
| M76 | tgggtaaaacctatcatcataggtGgtcatgcttatggggatcaatacaga | 152 |
| M77 | tgggtaaaacctatcatcataggtcAtcatgcttatggggatcaatacaga | 154 |
| M78 | tataagctggtggtggtgggcgccgAcggtgtgggcaagagtgcgctgacc | 156 |
| M79 | tataagctggtggtggtgggcgccCgcggtgtgggcaagagtgcgctgacc | 158 |
| M80 | ttggacatcctggataccgccggAAaggaggagtacagcgccatgcgggac | 160 |
| M81 | ttggacatcctggataccgccggccTggaggagtacagcgccatgcgggac | 162 |
| M82 | ttggacatcctggataccgccggccGggaggagtacagcgccatgcgggac | 164 |
| M83 | gagggttggctgcacaaacgagggAagtacatcaagacctggcggccacgc | 166 |
| M84 | attgcgagagagctgcatcagttcGcttttgacctgctaatcaagtcacac | 168 |
| M85 | attgcgagagagctgcatcagttcGGttttgacctgctaatcaagtcacac | 170 |
| M86 | cagcccgactcctttgcagccttgcActctagcctcaatgaactgggagag | 172 |
| M87 | cagatggctgtctttcagtactcctTgatggggctcatggtgtttgccatg | 174 |
| M88 | cagatggctgtcattcagtactcctTTatggggctcatggtgtttgccatg | 176 |

[0908] Table 3 shows the gene origin, the specific frameshift mutation (FR), the amino acid sequences of the identified neoantigens that arose from frameshift events and frequency of the mutation in patients. The wild-type sequence is bolded in Table 3, followed by the novel sequence due to frameshift. Table 4 shows their corresponding polynucleotide sequences. The mutant sequences are capitalized in Table 4. Patient frequency (%) in Table 3 was obtained from Armenia et al., Nat Genet 50(5): 645-651, 2018.

TABLE 3

| | | | Patient | | SEQ |
|---|---|---|---|---|---|
| Neoepitope | | | Frequency | | ID |
| ID | Gene | Frameshift | (%) | Amino acid sequence | NO: |
| FR1 | ZFHX3 | E763Sfs*61 | 0.2962 | QNLQNGGGSRSSATLP | 177 |
| | | | | GRRRRRWLRRRRQPISV | |
| | | | | APAGPPRRPNQKPNPPG | |
| | | | | GARCVIMRPTWPGTSAF | |
| | | | | T | |
| FR2 | ZFHX3 | E763Gfs*26 | 0.0987 | QNLQNGGGGAGLQPHC | 179 |
| | | | | RGGGGGGGCGGGGSQY | |
| | | | | Q | |
| FR3 | APC | T1556Nfs*3 | 0.3949 | NQEKEAEKNY | 181 |
| FR4 | SPEN | A2105Lfs*33 | 0.1974 | DAAVSPRGLQHRQGRG | |
| | | | | NLGWWQSPLRKVRVPK | 183 |
| | | | | RRMVYHPS | |
| FR5 | BRCA2 | T3085Nfs*26 | 0.1974 | FVVSVVKKNRTCPFRLF | 185 |
| | | | | VRRMLQFTGNKVLDRP | |
| FR6 | BRCA2 | K2674Rfs*2 | 0.1974 | RSRRSAIKR | 187 |
| FR7 | ARID4A | S1067Rfs*16 | 0.2962 | SIIVQERERAERRVRRG | 189 |
| | | | | QVMEIVD | |
| FR8 | SMAR | N770Kfs*28 | 0.1974 | NNLVTEKKHRNVQCHD | 191 |
| | CAD1 | | | AVEENGQSSFITSPILHS | |
| FR9 | RNF43 | G659Vfs*41 | 0.3949 | HPQRKRRGVPPSPPLAL | |
| | | | | GPRMQLCTQLARFFPITP | 193 |
| | | | | PVWHILGPQRHTP | |
| FR10 | AXIN2 | G665Afs*24 | 0.1974 | ASRHHLWGATAGTPAP | 195 |
| | | | | PPVPTCSPRTLRCLP | |
| FR11 | ERF | L525Sfs*6 | 0.2962 | GPGEAGGPSPQGG | 197 |
| FR12 | ERF | G299Efs*12 | 0.2962 | GGGPSGSGEAPTSPSAL | 199 |
| | | | | RT | |
| FR13 | CHD3 | R599Vfs*16 | 0.3949 | GNPDVPPPVLFKADQSE | 201 |
| | | | | SSLSSG | |
| FR14 | KMT2C | S143Vfs*3 | 0.2962 | AFCYCGEKVP | 203 |
| FR15 | FOXA1 | M253_ | 0.0987 | TLHPDSGNGCYLRRQK | 205 |
| | | N256del | | | |
| FR16 | FOXA1 | F254_ | 0.2962 | LHPDSGNMYGCYLRRQ | 207 |
| | | N256delinsY | | | |
| FR17 | FOXA1 | F254_ | 0.0987 | LHPDSGNMCCYLRRQK | 209 |
| | | G257delinsC | | R | |

TABLE 4

| Neo- | | SEQ |
|---|---|---|
| antigen | | ID |
| ID | Polynucleotide sequence | NO: |
| FR1 | Cagaacctgcagaatggaggggggagcaggtcttcagccacactgccggggcggc | 178 |
| | ggcggcggcggtggctgcggcggcggcggcagccaatatcagtagctcctgcgggg | |
| | ccccctcgccgaccaaaccaaaaaccaaacccacctggcggtgcgaggtgtgtgatta | |
| | tgagaccaacgtggccaggaacctccgcattcaca | |
| FR2 | cagaacctgcagaatggaggggggGgagcaggtcttcagccacactgccggggcg | 180 |
| | gcggcggcggcggtggctgcggcggcggcggcagccaatatcagtag | |
| FR3 | aaccaagagaaagaggcagAaaaaaactattga | 182 |
| FR4 | gatgctgctgtcagtcccagggggctgcagcacaggcaggggagagggaatctggg | 184 |
| | gtggtggcagtctcccctgagaaaagtgagagtccccaaaaggaggatggtttatcatc | |
| | ccagttga | |
| FR5 | tttgtcgtttctgttgtgaAaaaaaacaggacttgcccattcgtctatttgtcagacgaatg | 186 |
| | ttacaatttactggcaataaagttttggatagaccttaa | |
| FR6 | agaagcagaagatcggctataaaaagataatg | 188 |
| FR7 | agtataattgtacaAGagagagagagagcagagagaagggtcagaagaggccaag | 190 |
| | tgatggaaatagtggattaa | |
| FR8 | aataacttggtcacagAaaaaaaacacagaaatgtgcaatgtcatgatgcagttgagga | 192 |
| | aaatggccaatcatcctttattacatcgccaatattacacagctgaaa | |
| FR9 | cacccacagaggaaaaggcggggggtccctccgagcccacccctggctctcggccc | 194 |
| | caggatgcaactgtgcacccagcttgccagatttttccccattacacccccagtgtggca | |
| | tatccttggtccccagaggcacaccccttgatc | |
| FR10 | gccagccggcaccatctgtggggggcaacagcgggcacccccgcaccaccccccgt | 196 |
| | gcccacctgttcacccaggaccctgcgatgcctcccctgacc | |
| FR11 | gggcctggggaggctgggggcccctcaccccaaggcgggtgagc | 198 |
| FR12 | ggcggggggcccagcggctcaggggaggctcccacttctccttcagccctgaggaca | 200 |
| | tgaaa | |
| FR13 | ggaaatccagatgtcccaccccccgtcctcttcaaggcagatcagagcgagagttcttt | 202 |
| | gtcaagtgggtag | |
| FR14 | gctttttgttactgtggggaaaaagttccttagga | 204 |
| FR15 | acgctgcacccggactccggcaacggctgctacttgcgccgccagaagcg | 206 |
| FR16 | acgctgcacccggactccggcaacatgtacggctgctacttgcgccgccagaa | 208 |
| FR17 | ctgcacccggactccggcaacatgtgctgctacttgcgccgccagaagcgc | 210 |

[0909] Table 5 shows the gene origin and amino acid sequences of the identified neoantigens that arose from gene fusion (FUS) events. Table 6 shows their corresponding polynucleotide sequences. Table 7 shows the prevalence of the FUS neoantigens in analyzed databases.

TABLE 5

| Neo- | | | SEQ |
|---|---|---|---|
| antigen | Fusion | | ID |
| ID | Gene | Amino acid sequence | NO: |
| FUS1 | SLC45A3-> | CGASACDVSLIAMDSA | 211 |
| | ELK4 | GASACDVSLIAMDSAITLW | 1001 |
| FUS2 | ARHGEF38-> | TEYNQKLQVNQFSESK | 213 |
| | ARHGEF38- | | |
| | IT1 | | |
| FUS3 | MSMB-> | TEISCCTLSSEENEYLPRPEWQLQ | 215 |
| | NCOA4 | | |
| FUS4 | LIPE->CNFN | GLVSFGEHFCLPCALC | 217 |
| FUS5 | TMPRSS2-> | NSKMALNSEALSVVSE | 219 |
| | ERG | | |
| FUS6 | TMPRSS2-> | CEERGAAGSLISCE | 221 |
| | ERG | | |
| FUS7 | NME4-> | LWFQSSELSPTGAPWPSRRPTWRGT | 223 |
| | DECR2 | TVSPRTATSSARTCCGTKWPSSQEA | |
| | | ALGLGSGLLRFSCGTAAIR | |
| FUS8 | INCA1-> | WGMELAASRRFSWDHHSAGGPPRVP | 225 |
| | CAMTA2 | SVRSGAAQVQPKDPLPLRTLAGCLA | |
| | | RTAHLRPGAESLPQPQLHCT | |
| FUS9 | AP5S1-> | KEQILAVASLVSSQSIHPSWGQSPL | 227 |
| | MAVS | SRI | |
| FUS10 | DIP2A-> | LELELSEGVCFRLR | 229 |
| | DIP2A-IT1 | | |
| FUS11 | MBTPS2-> | QQLRIFCAAMASNEDFS | 231 |
| | YY2 | | |
| FUS15 | D2HGDH-> | HVVGYGHLDTSGSSSSSSWP | 345 |
| | | GAL3ST2 | |
| FUS18 | OPN3-> | DGFSGSLFAVVTRRCYFLKWRTIFP | 233 |
| | CHML | QSLMWL | |
| FUS19 | GTF2F1-> | KMHFSLKEHPPPPCPP | 235 |
| | PSPN | | |
| FUS23 | NUDT14-> | DLRRVATYCAPLPSSWRPGTGTTIP | 237 |
| | JAG2 | PRMRSC | |
| FUS24 | DMPK-> | LQERMELLACGAERGAGGWGGGGG | 239 |
| | SIX5 | GGGGDRRGGGGSAPALADFAGGRG | |

TABLE 6

| Neo- | | |
|---|---|---|
| antigen | | SEQ |
| ID | Polynucleotide sequence | ID |
| FUS1 | TGCGGGGCCTCTGCCTGTGATGTCTCCCTCATTG | 212 |
| | CTATGGACAGTGCT | |
| | GGGGCCTCTGCCTGTGATGTCTCCCTCATTGCTA | 1000 |
| | TGGACAGTGCTATCACCCTGTGG | |
| FUS2 | ACCGAATACAACCAGAAATTACAAGTGAATCA | 214 |
| | ATTTAGTGAATCCAAA | |
| FUS3 | ACAGAAATTTCATGTTGCACCCTGAGCAGTGAG | 216 |
| | GAGAATGAATACCTTCCAAGACCAGAGTGGCA | |
| FUS4 | GGGCTGGTGTCCTTCGGGGAGCACTTTTGTCTG | 218 |
| | CCCTGCGCCCTCTGCCA | |
| FUS5 | AACAGCAAGATGGCTTTGAACTCAGAAGCCTTA | 220 |
| | TCAGTTGTGAGTGAG | |
| FUS6 | TGTGAGGAGCGCGGCGCGGCAGGAAGCCTTAT | 222 |
| | CAGTTGTGAG | |
| FUS7 | CTGTGGTTCCAGAGCAGTGAGCTGTCCCCGACG | 224 |
| | GGAGCGCCATGGCCCAGCCGCCGCCCGACGTG | |
| | GAGGGGGACGACTGTCTCCCCGCGTACCGCCAC | |
| | CTCTTCTGCCCGGACCTGCTGCGGGACAAAGTG | |
| | GCCTTCATCACAGGAGGCGGCTCTGGGATTGGG | |
| | TTCCGGATTGCTGAGATTTTCATGCGGCACGGC | |
| | TGCCATACGG | |
| FUS8 | TGGGGGATGGAGTTGGCAGCGTCTCGGAGGTTC | 226 |
| | TCCTGGGACCACCACTCCGCCGGGGGGCCGCCC | |
| | AGAGTGCCAAGCGTCCGATCCGGCGCCGCCCA | |
| | AGTGCAGCCCAAGGACCCGCTCCCGCTCCGCAC | |
| | CCTGGCAGGCTGCCTAGCCAGGACTGCGCACCT | |
| | GCGCCCTGGGGCGGAGTCCTTACCCCAACCCCA | |
| | GCTTCACTGCACA | |
| FUS9 | AAGGAACAGATTTTAGCTGTGGCCAGTCTCGTT | 228 |
| | TCCTCTCAGTCCATCCACCCTTCATGGGGCCAG | |
| | AGCCCTCTCTCCAGAATC | |
| FUS10 | CTGGAGCTGGAGCTGTCGGAAGGAGTCTGCTTC | 230 |
| | AGATTAAGA | |
| FUS11 | CAGCAGCTAAGGATATTTTGTGCAGCCATGGCC | 232 |
| | TCCAACGAAGATTTCTCCA | |
| FUS15 | CACGTGGTGGGCTATGGCCACCTTGATACTTCC | 346 |
| | GGGTCATCCTCCTCCTCCTCCTGGCCC | |
| FUS18 | GACGGGTTTAGCGGCAGCCTCTTCGCAGTTGTC | 234 |
| | ACCAGACGCTGTTACTTCCTAAAATGGCGGACA | |
| | ATCTTCCCACAGAGTTTGATGTGGTTA | |
| FUS19 | AAAATGCACTTCTCCCTCAAGGAGCACCCACCG | 236 |
| | CCCCCTTGCCCGCCT | |
| FUS23 | GATCTGCGCCGGGTCGCCACATACTGCGCTCCT | 238 |
| | TTACCCTCATCGTGGAGGCCTGGGACTGGGACA | |
| | ACGATACCACCCCGAATGAGGAGCTGC | |
| FUS24 | TTGCAGGAGCGGATGGAGTTGCTTGCCTGCGGA | 240 |
| | GCCGAGCGCGGGGCCGGCGGCTGGGGGGGAGG | |
| | CGGTGGCGGCGGCGGCGGCGACCGAAGAGGAG | |
| | GAGGAGGAAGCGCGCCAGCTCTTGCAGACTTTG | |
| | CAGGCGGCCGAGGG | |

TABLE 7

| | TCGA | |
|---|---|---|
| Neoantigen ID | (%) | SU2C (%) |
| FUS1 | 30.51 | 23.26 |
| FUS2 | 63.58 | 46.51 |
| FUS3 | 35.04 | 23.26 |
| FUS4 | 12.20 | 11.63 |
| FUS5 | 12.40 | 18.60 |
| FUS6 | 21.46 | 32.56 |
| FUS7 | 3.35 | 16.28 |
| FUS8 | 1.18 | 32.56 |
| FUS9 | N.O. | 18.60 |
| FUS10 | N.O. | 13.95 |
| FUS11 | 1.57 | 13.95 |
| FUS15 | 0.39 | 9.30 |
| FUS18 | 0.39 | 9.30 |
| FUS19 | 8.86 | 30.23 |
| FUS23 | N.O. | 9.30 |
| FUS24 | N.O. | 9.30 |

N.O. not observed

[0910] Table 8 shows the gene origin and amino acid sequences of the identified neoantigens that arose from alternative splicing (AS) events. Table 9 shows their corresponding polynucleotide sequences. Table 10 shows the prevalence of the AS neoantigens in analyzed databases.

TABLE 8

| Neo- | | | SEQ |
|---|---|---|---|
| epitope | | | ID |
| ID | Gene | Amino acid sequence | NO: |
| AS1 | ABCC4 | LTFLDFIQVTLRVMSGSQMENGSSY | 241 |
| | | FFKPFSWGLGVGLSAWLCVMLT | |
| AS2 | SLC30A4 | FMIGELVGELCCQLTFRLPFLESLCQ | 243 |
| | | AVVTQALRFNPSFQEVCIYQDTDLM | |
| AS3 | DNAH8 | VAMMVPDRQVHYDFGL | 245 |
| AS4 | NCAPD3 | WCPLDLRLGSTGCLTCRHHQTSHE | 247 |
| AS5 | DHDH | VVGRRHETAPQPLLVPDRAGGEGGA | 249 |
| AS6 | ACSM1 | DYWAQKEKISIPRTHLC | 251 |
| AS7 | ACSM1 | DYWAQKEKGSSSFLRPSC | 253 |
| AS8 | CACNA1D | LVLGVLSGHSGSRL | 255 |
| AS9 | CACNA1D | PVPTATPGVRSVTSPQGLGLFLKFI | 257 |
| AS10 | CHRNA5 | KENDVREVCDVYLQMQIFFHFKFRS | 259 |
| | | YFH | |
| AS11, | CPNE7 | VPFRELKNQRTAQGAPGIHHAASPV | 261 |
| AS33 | | AANLCDPARHAQHTRIPCGAGQVRA | |
| | | GRGPEAGGGVLQPQRPAPEKPGCPC | |
| | | RRGQPRLHTVKMWRA | |
| AS12 | EVPL | FARKMLEKVHRQHLQLSHNSQE | 263 |
| AS13 | GRIN3A | KRSFAVTERII | 265 |
| AS14 | IQCG | MFLRKEQQVGPHSFSML | 267 |
| AS15 | LRRC45 | VLRFLDLKVRYLHS | 269 |
| AS16 | LRRC45 | GNTTLQQLGEASQAPSGSLIPLRLPL | 271 |
| | | LWEVRG | |
| AS17 | MPHOSPH9 | GLNLNTDRPGGYSYSIWWKNNAKNR | 273 |
| AS18 | NWD1 | WKFEMSYTVGGPPPHVHARPRHWK | 275 |
| | | TDR | |
| AS19 | NWD1 | QWQHYHRSGEAAGTPLWRPTRN | 277 |
| AS20 | PFKFB4 | KVLNEIDAVVTVPPSLSTSQIPQGCCI | 279 |
| | | IL | |
| AS21 | RECQL4 | ANLKGTLQVRSGQAVSPR | 281 |
| AS22 | TONSL | LQAAASGQGKQGVPCPWGCCAYAE | 283 |
| | | SPRALISGDAPSQVEREVPGPCLNTHS | |
| | | LSHRSPQLPGLPHPKQPSV | |
| AS23 | ZNF614 | KIQNKNCPD | 285 |
| AS32 | TONSL | GEVELSEGGEGQRHLAFPWACSGPG | 287 |
| | | WRGVCCAAVEPA | |
| AS63 | TDRD1 | IEMKKLLKS | 289 |
| AS34 | LRRC45 | KMRAIQAEGGHGQACCGGAWGWA | 291 |
| | | PGDGGPQGMLTHTLPTLGFQSAWTW | |
| | | RREDADRAWRTPKACASRRWSI | |
| AS35 | AMACR | LLEPFRRGEPGPRGLLSGSSRGGEGP | 293 |
| | | GRSIEAAPATPLPCCRKNPCRPQPSRF | |
| | | LPPRVLLVIILPKLDCPKLGF | |
| AS36 | CCNF | PSGRRTKRLVTLRSGCAIQCWHPRA | 295 |
| | | GPVPSALPHTERPPRLVRGAADPRTV | |
| | | TLGRSPAVMPRAPA | |
| AS37 | RECQL4 | CHLFLQPQVGTPPPHTASARAPSGPP | 297 |
| | | HPHESCPAGRRPARAAQTCARRQHG | |
| | | LPGCEEAGTARVPSLHLHLHQAALG | |
| | | AGRGRGWGEACAQVPPSRG | |
| AS38 | LRRC45 | KELKLEQQVGGQGLRGVGQGVRG | 299 |
| | | GFVTLTTHTPFPSQEAAERESK | |
| AS39 | CCNF | GEISQEEVPPSRHLGVSWGAGVWA | 301 |
| | | GLTLGASAPPNSSFPSGAELQPVVCCI | |
| | | RSDTRQPRPPDFPQHRGDPRLPQLSL | |
| | | GAENQTVSYPAFWLRHTMLASSCRP | |
| | | SSLSASSHREAPKACQGSSRSQDSDP | |
| | | GTEPCSHASGPCVTSTVSSPGLLPQRL | |
| | | LPLALTGLPVEEDGFEHAGA | |
| AS40 | LRRC45 | DCMLSEEGGQARRGGSLCSLAAHTI | 303 |
| | | ASAARGRFLSRLSNFCAVVKASRGA | |
| | | PSCTWE | |
| AS41 | RHPN1 | EAFQRAAGEGGPGRGGARRGARVL | 305 |
| | | QSPFCRAGAGEWLGHQSLR | |
| AS42 | SLC39A4 | PEPRRLSPGEPRGRPRKGWGIWGLC | 307 |
| | | GARVGPKAWR | |
| AS43 | CPNE7 | VPFRELKNVSVLEGLRQGRLGGPCS | 309 |
| | | CHCPRPSQARLTPVDVAGPFLCLGDP | |
| | | GLFPPVKSSI | |
| AS44 | FASN | FVSLTAIQMASSATPWGRWPVATPT | 311 |
| | | AACPRRRPSSLPTGGDSASKKPISRRA | |
| | | PWQPWACPGRSVNSAAPRAWCPPAT | |
| | | TPRTQSPSRDLRPRCLSSWSS | |
| AS45 | RBM47 | PVAIKPGTGPPNNSSIHGGSKRSENS | 313 |
| | | YCRDLRGQLRAICCSSYSHDRHTTEE | |
| | | RGSRGRHVWRIRRLHTSGLPCCCHS | |
| | | GPHPRRLPDILRLVTSTKTDHTNTTE | |
| | | GTLDYL | |
| AS46 | SERINC5 | KWNKNWTATLGALTIRGHKLLCHL | 315 |
| | | PHLLSSVQQTCRSSSR | |
| AS47 | AGRN | FKKFDGPCGERGGGRTARALWARG | 317 |
| | | DSVLTPALDPQTPVRAPSLTRAAAAV | |
| AS48 | SYT17 | ENASLVFTGSNSPIPACELSSHPAHGI | 319 |
| | | SPWIPSPGNEHFHGIKKQVKAIKVE | |
| AS49 | PDF | RLTQRLVQGWTPMENRWCGRRAG | 321 |
| | | GQPASSSTRWTTCRAACLLTKWTAG | |
| | | RSQTSIG | |
| AS50 | LRIF1 | ENSGNASRWLHVPSSSDDWLGWKK | 323 |
| | | SSAITSNS | |
| AS51 | CPNE7 | GMECTLGQVGAPSPRREEDGWRGG | 325 |
| | | HSRFKADVPAPQGPCWGGQPGSAPS | |
| | | SAPPEQSLLD | |
| AS52 | ILDR1 | KGSVERRSVSLGHPAEGWAWAERS | 327 |
| | | LQPGMTTANTGCLSFHHRGCLLPVLP | |
| | | KLHCGLGGLPLVRAKEIKRVQRAGE | |
| | | SSLPVKGLLTVASAVIAVLWGRPSEV | |
| | | TGENEAQHD | |
| AS53 | PEX10 | FGLTTLAGRSSHGTSGLRAATHTKS | 329 |
| | | GDGGQGAARQCEKLLELARATRPW | |
| | | GRSTSASSRWTHRGYMCPPRCAVACW | |
| AS54 | ABCC4 | HDSDKIMAVCMGCLLTRHVQCQAM | 331 |
| | | EMQQ | |
| AS55 | SPOCK1 | DGHSYTSKVNCLLLQDGFHGCVSIT | 333 |
| | | GAAGRRNLSIFLFLMLCKLEFHAC | |
| AS56 | TM9SF3 | LLNAEDYRCAIHSKEIYLLSPSPHQA | 335 |
| | | MDKFSLCCINCNLCLHVFLLLLFFQN | |
| | | KDVWLISNIILLWIYGGI | |
| AS57 | KLK3 | TGGKSTCSAPGPQSLPSTPFSTYPQW | 337 |
| | | VILITEL | |
| AS58 | CREB3L1 | VETLENANSFSSGIQPLLCSLIGLENP | 339 |
| | | T | |
| AS59 | ACSL3 | AGAGTISEGSVLHGQRLECDARRFF | 341 |
| | | GCGTTILAEWEHH | |
| AS55.1 | SPOCK1 | DGHSYTSKVNCLLLQDGFHGCVSIT | 385 |
| | | GAAGRRNLSIFLFLMLCKLEFHA | |

TABLE 9

| Neo- | | SEQ |
|---|---|---|
| epitope | | ID |
| ID | Polynucleotide sequence | NO: |
| AS1 | CTGACGTTTTTAGATTTCATCCAGGTAACGTTGAGAG | 242 |
| | TAATGTCAGGATCTCAAATGGAAAACGGAAGTTCCT | |
| | ATTTTTTCAAGCCCTTTTCATGGGGTCTGGGGGTGGG | |
| | ACTCTCGGCCTGGCTGTGTGTAATGTTAACT | |
| AS2 | TTCATGATTGGAGAACTTGTAGGTGAGTTGTGTTGCC | 244 |
| | AACTCACTTTCCGTTTACCTTTCCTCGAGAGTCTTTG | |
| | TCAAGCTGTAGTTACACAGGCTTTGAGGTTTAACCC | |
| | ATCTTTTCAGGAAGTTTGTATTTATCAAGACACTGAT | |
| | CTCATG | |
| AS3 | GTTGCTATGATGGTTCCTGATAGACAGGTTCATTATG | 246 |
| | ACTTTGGATTG | |
| AS4 | TGGTGTCCGCTGGATCTTAGACTCGGTTCCACTGGAT | 248 |
| | GTCTCACATGCAGACATCATCAAACGTCACATGAG | |
| AS5 | GTCGTGGGAAGGCGTCATGAAACAGCTCCTCAACCC | 250 |
| | CTGCTGGTGCCCGACCGAGCTGGTGGTGAAGGGGGA | |
| | GCA | |
| AS6 | GACTACTGGGCTCAAAAGGAGAAGATCAGCATCCCC | 252 |
| | AGAACACACCTGTGT | |
| AS7 | GACTACTGGGCTCAAAAGGAGAAGGGATCATCTTCA | 254 |
| | TTCCTGCGACCATCCTGT | |
| AS8 | CTTGTACTTGGTGTATTGAGCGGGCACAGTGGCTCA | 256 |
| | CGCCTA | |
| AS9 | CCTGTCCCAACTGCTACACCTGGGGTAAGATCAGTG | 258 |
| | ACTAGTCCCCAGGGGCTGGGCCTTTTCCTTAAGTTTA | |
| | TT | |
| AS10 | AAGGAAAATGATGTCCGTGAGGTCTGTGATGTGTAT | 260 |
| | TTACAAATGCAGATCTTCTTCCATTTTAAGTTCAGAA | |
| | GTTACTTTCAT | |
| AS11, | GTGCCCTTCCGGGAGCTCAAGAACCAGAGAACAGCA | 262 |
| AS33 | CAAGGGGCTCCTGGGATCCACCACGCGGCTTCCCCC | |
| | GTTGCTGCCAACCTCTGCGACCCGGCGAGACACGCA | |
| | CAGCACACACGCATCCCCTGCGGCGCTGGCCAAGTG | |
| | CGTGCTGGCCGAGGTCCCGAAGCAGGTGGTGGAGTA | |
| | CTACAGCCACAGAGGCCTGCCCCCGAGAAGCCTGGG | |
| | TGTCCCTGCCGGAGAGGCCAGCCCAGGCTGCACACC | |
| | GTGAAGATGTGGAGGGCG | |
| AS12 | TTTGCTAGAAAAATGCTGGAGAAGGTACACAGACAA | 264 |
| | CACCTACAGCTTTCCCACAATAGCCAGGAA | |
| AS13 | AAGAGAAGTTTTGCTGTCACGGAGAGGATCATC | 266 |
| AS14 | ATGTTCCTTAGAAAGGAGCAGCAGGTGGGTCCCCAC | 268 |
| | AGCTTTTCTATGCTT | |
| AS15 | GTGCTGCGCTTTCTGGACTTAAAGGTGAGATACCTG | 270 |
| | CACTCT | |
| AS16 | GGCAACACCACCCTCCAGCAGCTGGGTGAGGCCTCC | 272 |
| | CAGGCGCCCTCAGGCTCCCTCATCCCTCTGAGGCTG | |
| | CCTCTGCTCTGGGAAGTGAGGGGC | |
| AS17 | GGACTGAACTTAAATACTGATAGACCAGGTGGTTAC | 274 |
| | AGCTATTCAATTTGGTGGAAAAACAATGCCAAGAAC | |
| | AGA | |
| AS18 | TGGAAATTCGAGATGAGCTACACGGTGGGTGGCCCG | 276 |
| | CCTCCCCATGTTCATGCTAGACCCAGGCATTGGAAA | |
| | ACTGATAGA | |
| AS19 | CAGTGGCAGCACTACCACCGGTCAGGTGAGGCCGCA | 278 |
| | GGGACTCCCCTCTGGAGACCCACAAGAAAC | |
| AS20 | AAGGTCCTCAACGAGATCGATGCGGTAGTTACCGTC | 280 |
| | CCTCCCTCCCTGTCTACCTCCCAGATACCGCAGGGCT | |
| | GCTGCATCATATTG | |
| AS21 | GCCAATCTGAAAGGCACCCTGCAGGTGAGGAGTGG | 282 |
| | GCAGGCAGTGAGTCCACGC | |
| AS22 | CTCCAGGCGGCTGCCTCGGGCCAAGGCAAGCAGGGC | 284 |
| | GTCCCTTGTCCCTGGGGTTGCTGTGCCTACGCTGAGA | |
| | GTCCCCGGGCCCTGATTTCGGGAGATGCTCCATCAC | |
| | AGGTGGAGCGGGAGGTGCCGGGCCCCTGCCTCAACA | |
| | CGCATTCTCTCTCCCACAGATCCCCACAGCTCCCAGG | |
| | CCTTCCACACCCCAAGCAGCCTTCTGTT | |
| AS23 | AAAATTCAGAATAAAAATTGTCCAGAC | 286 |
| AS32 | GGCGAGGTGGAGCTCTCAGAGGGCGGTGAGGGCCA | 288 |
| | GCGGCACCTTGCATTTCCCTGGGCCTGCTCTGGGCCG | |
| | GGCTGGAGAGGGGTGTGCTGTGCTGCTGTGGAGCCT | |
| | GCT | |
| AS63 | ATTGAAATGAAAAAACTGTTAAAAAGT | 290 |
| AS34 | AAGATGCGGGCCATCCAGGCCGAGGGTGGGCACGG | 292 |
| | GCAGGCCTGCTGTGGAGGGGCCTGGGGATGGGCACC | |
| | GGGGGACGGGGGCCCCCAGGGGATGCTCACGCATA | |
| | CTCTGCCCACCCTGGGCTTCCAGAGCGCCTGGACAT | |
| | GGAGAAGAGAAGATGCAGACAGAGCCTGGAGGACT | |
| | CCGAAAGCCTGCGCATCAAGGAGGTGGAGCATA | |
| AS35 | CTGCTGGAGCCCTTCCGCCGCGGTGAGCCCGGGCCC | 294 |
| | CGCGGGCTGCTCTCGGGAAGTTCCCGCGGAGGGGAG | |
| | GGGCCTGGCCGTTCGATCGAGGCTGCACCCGCCACA | |
| | CCTTTGCCCTGTTGCCGCAAGAACCCTTGTCGGCCCC | |
| | AGCCTTCCAGATTTTTGCCTCCTAGGGTATTGTTAGT | |
| | GATCATTCTTCCCAAACTGGATTGTCCAAAACTTGG | |
| | GTTC | |
| AS36 | CCCTCGGGGCGGAGAACCAAACGGTTAGTTACCCTG | 296 |
| | CGTTCTGGCTGCGCCATACAATGCTGGCATCCTCGTG | |
| | CCGGCCCAGTTCCCTCAGCGCTTCCTCACACAGAGA | |
| | GGCCCCCAAGGCTTGTCAGGGGAGCAGCAGATCCCA | |
| | GGACAGTGACCCTGGGACGGAGCCCTGCAGTCATGC | |
| | CTCGGGCCCCTGCG | |
| AS37 | TGCCACCTCTTCCTGCAGCCCCAGGTTGGCACCCCCC | 298 |
| | CCCCCCACACTGCCAGTGCTCGAGCCCCCAGTGGTC | |
| | CACCCCACCCTCATGAAAGTTGCCCTGCAGGGCGAA | |
| | GACCTGCGAGAGCTGCGCAGACATGTGCACGCCGAC | |
| | AGCACGGACTTCCTGGCTGTGAAGAGGCTGGTACAG | |
| | CGCGTGTTCCCAGCCTGCACCTGCACCTGCACCAGG | |
| | CCGCCCTCGGAGCAGGAAGGGGCCGTGGGTGGGGA | |
| | GAGGCCTGTGCCCAAGTACCCCCCTCAAGAGGC | |
| AS38 | AAGGAGCTCAAGCTGGAGCAGCAGGTGGGTGGGCA | 300 |
| | GGGCTTGAGAGGGGTGGGCCAAGGGGTGCGTGGCG | |
| | GCTTCGTGACCCTCACTACCCATACCCCGTTCCCCTC | |
| | CCAGGAAGCTGCAGAGCGGGAGTCTAAA | |
| AS39 | GGAGAAATCAGCCAGGAAGAGGTGCCTCCCTCCCGC | 302 |
| | CACCTGGGCGTCTCATGGGGTGCTGGGGTGTGGGCG | |
| | GGCCTCACCCTCGGGGCCTCTGCACCCCCTAACTCTA | |
| | GCTTCCCCTCAGGTGCTGAGCTACAGCCAGTTGTGT | |
| | GCTGCATTAGGAGTGACACAAGACAGCCCCGACCCC | |
| | CCGACTTTCCTCAGCACAGGGGAGATCCACGCCTTC | |
| | CTCAGCTCTCCCTCGGGGCGGAGAACCAAACGGTTA | |
| | GTTACCCTGCGTTCTGGCTGCGCCATACAATGCTGGC | |
| | ATCCTCGTGCCGGCCCAGTTCCCTCAGCGCTTCCTCA | |
| | CACAGAGAGGCCCCCAAGGCTTGTCAGGGGAGCAG | |
| | CAGATCCCAGGACAGTGACCCTGGGACGGAGCCCTG | |
| | CAGTCATGCCTCGGGCCCCTGCGTAACCTCCACTGTC | |
| | TCCAGCCCAGGTCTCCTTCCTCAGAGGCTATTGCCTC | |
| | TCGCTCTGACTGGGCTCCCTGTGGAGGAAGATGGTT | |
| | TCGAGCACGCGGGAGCC | |
| AS40 | GACTGCATGCTCAGCGAGGAAGGTGGGCAGGCGCG | 304 |
| | GCGGGGTGGATCCCTCTGCTCCTTAGCTGCCCACAC | |
| | CATTGCCTCGGCAGCCCGAGGTCGCTTCCTCTCCAG | |
| | GCTCTCCAATTTCTGTGCCGTAGTTAAAGCGAGCAG | |
| | GGGCGCCCCTTCCTGCACCTGGGAG | |
| AS41 | GAGGCCTTCCAGAGGGCCGCTGGTGAGGGCGGCCCG | 306 |
| | GGCCGCGGTGGGGCACGGCGCGGTGCCAGGGTGTTG | |
| | CAGAGCCCCTTTTGCAGGGCAGGAGCTGGGGAGTGG | |
| | TTAGGACATCAGTCCCTCAGG | |
| AS42 | CCTGAGCCCAGGAGACTGAGCCCAGGTGAGCCCAG | 308 |
| | GGGGCGACCCCGGAAGGGCTGGGGGATCTGGGGTTT | |
| | GTGTGGAGCGCGGGTGGGGCCCAAGGCTTGGCGG | |
| AS43 | GTGCCCTTCCGGGAGCTCAAGAACGTGAGTGTCCTG | 310 |
| | GAGGGGCTCCGTCAAGGCCGGCTTGGGGGTCCCTGT | |
| | TCATGTCACTGCCCAAGACCTTCCCAGGCCAGGCTC | |
| | ACGCCAGTGGATGTGGCAGGTCCCTTCTTGTGTCTG | |
| | GGGGATCCTGGGCTGTTCCCCCCAGTCAAGAGCAGT | |
| | ATC | |
| AS44 | TTTGTGAGCCTGACTGCCATCCAGATGGCATCGTCG | 312 |
| | GCCACTCCCTGGGGGAGGTGGCCTGTGGCTACGCCG | |
| | ACGGCTGCCTGTCCCAGGAGGAGGCCGTCCTCGCTG | |
| | CCTACTGGAGGGGACAGTGCATCAAAGAAGCCCATC | |
| | TCCCGCCGGGCGCCATGGCAGCCGTGGGCTTGTCCT | |
| | GGGAGGAGTGTAAACAGCGCTGCCCCCCGGGCGTG | |
| | GTGCCCGCCTGCCACAACTCCAAGGACACAGTCACC | |
| | ATCTCGGGACCTCAGGCCCCGGTGTTTGAGTTCGTG | |
| | GAGCAGC | |
| AS45 | CCAGTTGCCATTAAACCTGGTACAGGGCCGCCCAAT | 314 |
| | AACTCCAGTATACACGGTGGCTCCAAACGTTCAGAG | |
| | AATTCCTACTGCCGGGATCTACGGGGCCAGTTACGT | |
| | GCCATTTGCTGCTCCAGCTACAGCCACGATCGCCAC | |
| | ACTACAGAAGAACGCGGCAGCCGCGGCCGCCATGT | |
| | ATGGAGGATACGCAGGCTACATACCTCAGGCCTTCC | |
| | CTGCTGCTGCCATTCAGGTCCCCATCCCCGACGTCTA | |
| | CCAGACATACTGAGGCTGGTGACCAGCACGAAGAC | |
| | AGACCACACAAACACCACTGAAGGAACGCTTGACTA | |
| | TTTA | |
| AS46 | AAGTGGAACAAGAACTGGACAGCCACACTCGGGGC | 316 |
| | TCTTACAATCAGGGGTCATAAGCTGCTATGTCACCT | |
| | ACCTCACCTTCTCAGCTCTGTCCAGCAAACCTGCAG | |
| | AAGTAGTTCTAGA | |
| AS47 | TTCAAGAAGTTCGACGGCCCTTGTGGTGAGCGCGGC | 318 |
| | GGCGGGCGCACGGCTCGAGCTCTGTGGGCGCGCGGC | |
| | GACAGCGTCCTGACTCCTGCCCTCGACCCCCAGACC | |
| | CCTGTCAGGGCGCCCTCCCTGACCCGAGCCGCAGCT | |
| | GCCGTG | |
| AS48 | GAAAATGCCAGCCTAGTGTTTACAGGATCCAACAGC | 320 |
| | CCCATACCAGCCTGCGAACTGAGTAGTCACCCAGCT | |
| | CATGGTATCAGTCCTTGGATACCCTCACCTGGAAAT | |
| | GAACATTTCCATGGCATAAAGAAGCAAGTAAAGGC | |
| | AATAAAAGTAGAA | |
| AS49 | CGGCTGACGCAACGGCTGGTCCAGGGCTGGACCCCA | 322 |
| | ATGGAGAACAGGTGGTGTGGCAGGCGAGCGGGTGG | |
| | GCAGCCCGCATCATCCAGCACGAGATGGACCACCTG | |
| | CAGGGCTGCCTGTTTATTGACAAAATGGACAGCAGG | |
| | ACGTTCACAAACGTCTATTGGA | |
| AS50 | GAAAATTCAGGCAACGCCTCGCGTTGGCTGCATGTA | 324 |
| | CCAAGTAGTTCAGACGATTGGCTCGGATGGAAAAAA | |
| | TCTTCTGCAATTACTTCCAATTCC | |
| AS51 | GGCATGGAGTGCACCCTGGGGCAGGTGGGTGCCCCG | 326 |
| | TCCCCTCGGAGGGAGGAGGACGGTTGGCGTGGGGG | |
| | CCACAGCCGATTCAAGGCTGATGTACCAGCACCGCA | |
| | GGGACCCTGCTGGGGTGGCCAACCTGGCTCTGCCCC | |
| | CTCCTCAGCTCCTCCTGAACAGTCATTATTAGAT | |
| AS52 | AAAGGGAGTGTGGAGAGGCGCTCGGTGAGCCTGGG | 328 |
| | GCATCCTGCTGAGGGTTGGGCATGGGCAGAGAGGA | |
| | GCCTCCAGCCAGGCATGACCACAGCCAACACAGGCT | |
| | GCCTCTCATTCCACCACAGAGGGTGCCTCCTCCCTGT | |
| | TTTGCCCAAATTACACTGTGGGCTAGGTGGACTACC | |
| | TCTTGTCAGAGCTAAAGAAATCAAGCGAGTGCAGAG | |
| | GGCAGGGGAGAGTTCGCTGCCTGTGAAGGGCCTTCT | |
| | CACCGTCGCTTCGGCTGTCATCGCAGTCCTGTGGGGT | |
| | AGGCCAAGCGAGGTCACAGGAGAAAATGAGGCTCA | |
| | GCATGAT | |
| AS53 | TTTGGCCTCACCACACTTGCAGGTAGAAGCTCCCAC | 330 |
| | GGGACCTCAGGACTGAGGGCAGCCACACACACCAA | |
| | GTCTGGGGACGGTGGCCAGGGGGCTGCCAGGCAGT | |
| | GTGAGAAGCTCCTGGAGCTGGCCCGGGCTACCAGAC | |
| | CCTGGGGGAGGAGTACGTCAGCATCATCCAGGTGGA | |
| | CCCATCGCGGATACATGTGCCCTCCTCGCTGCGCCGT | |
| | GGCGTGCTGG | |
| AS54 | ATTATTGACAGCGACAAGATAATGGCAGTGTGCATG | 332 |
| | GGGTGCCTGCTCACACGTCATGTGCAATGCCAGGCC | |
| | ATGGAGATGCAACAG | |
| AS55 | GATGGCCACTCCTACACATCCAAGGTGAATTGTTTA | 334 |
| | CTCCTTCAAGATGGGTTCCATGGCTGTGTGAGCATC | |
| | ACCGGGGCAGCTGGAAGAAGAAACCTGAGCATCTTC | |
| | CTGTTCTTGATGCTGTGCAAATTGGAGTTCCATGCTT | |
| | GT | |
| AS56 | CTACTAAATGCAGAAGATTACCGGTGTGCCATTCAT | 336 |
| | TCAAAAGAGATTTATCTTCTTTCCCCCTCCCCCCACC | |
| | AGGCAATGGACAAGTTTTCTCTCTGCTGCATCAACT | |
| | GCAATCTATGTTTACATGTATTCCTTTTACTACTATTT | |
| | TTTCAAAACAAAGATGTATGGCTTATTTCAAACATC | |
| | ATTTTACTTTGGATATATGGCGGTATT | |
| AS57 | ACAGGGGGCAAAAGCACCTGCTCGGCTCCTGGCCCT | 338 |
| | CAGTCTCTCCCCTCCACTCCATTCTCCACCTACCCAC | |
| | AGTGGGTCATTCTGATCACCGAACTG | |
| AS58 | GTGGAGACCCTGGAGAATGCCAACAGCTTCTCCAGC | 340 |
| | GGGATCCAGCCACTCCTCTGTTCCCTGATTGGCCTGG | |
| | AGAATCCCACC | |
| AS59 | GCTGGGGCTGGAACAATTTCCGAAGGTAGTGTTCTC | 342 |
| | CATGGTCAGAGGCTGGAGTGTGATGCCAGACGTTTT | |
| | TTTGGGTGTGGGACTACAATACTGGCAGAGTGGGAG | |
| | CACCAT | |
| AS55.1 | GATGGCCACTCCTACACATCCAAGGTGAATTGTTTA | 386 |
| | CTCCTTCAAGATGGGTTCCATGGCTGTGTGAGCATC | |
| | ACCGGGGCAGCTGGAAGAAGAAACCTGAGCATCTTC | |
| | CTGTTCTTGATGCTGTGCAAATTGGAGTTCCATGCT | |

TABLE 10

| Neoepitope ID | TCGA (%) | SU2C (%) |
|---|---|---|
| AS1 | 28.5 | 2.3 |
| AS2 | 18.5 | N.O. |
| AS3 | 10.4 | 25.6 |
| AS4 | 27.4 | 41.9 |
| AS5 | 18.7 | 9.3 |
| AS6 | 5.1 | 16.3 |
| AS7 | 5.1 | 16.3 |
| AS8 | N.O. | 14.0 |
| AS9 | 1.2 | 18.6 |
| AS10 | 8.9 | 27.9 |
| AS11 | 1.2 | 48.8 |
| AS12 | 0.4 | 34.9 |
| AS13 | 5.7 | 32.6 |
| AS14 | N.O. | 30.2 |
| AS15 | 4.5 | 46.5 |
| AS16 | 0.6 | 18.6 |
| AS17 | N.O. | 37.2 |
| AS18 | 12.6 | 20.9 |
| AS19 | 12.6 | 20.9 |
| AS20 | 0.2 | 16.3 |
| AS21 | N.O. | 11.6 |
| AS22 | 0.2 | 20.9 |
| AS23 | 3.1 | 18.6 |
| AS32 | 57.1 | N.O. |
| AS33 | 47.6 | N.O. |
| AS34 | N.O. | 42.9 |
| AS35 | N.O. | 42.9 |
| AS36 | N.O. | 40.5 |
| AS37 | N.O. | 38.1 |
| AS38 | N.O. | 35.7 |
| AS39 | N.O. | 33.3 |
| AS40 | N.O. | 33.3 |
| AS41 | N.O. | 33.3 |
| AS42 | N.O. | 33.3 |
| AS43 | N.O. | 31 |
| AS44 | N.O. | 28.6 |
| AS45 | N.O. | 26.2 |
| AS46 | N.O. | 26.2 |
| AS47 | N.O. | 23.8 |
| AS48 | N.O. | 23.8 |
| AS49 | N.O. | 23.8 |
| AS50 | N.O. | 23.8 |
| AS51 | N.O. | 23.8 |
| AS52 | 15.9 | 38.1 |
| AS53 | 16 | 9.5 |
| AS54 | 11.9 | N.O. |
| AS55 | 12.1 | N.O. |
| AS56 | 14.7 | N.O. |
| AS57 | 14.9 | N.O. |
| AS58 | 16.6 | N.O. |
| AS59 | 17.6 | N.O. |
| AS63 | 18.0 | |

N.O. not observed

### Example 3: Identification of Additional Neoantigens Using Bioinformatics

[0911] Additional neoantigen sequences were identified by further queries as described in Example 2. Table 11 shows the amino acid sequences of the additional neoantigens. Table 12 shows the corresponding polynucleotide sequences.

TABLE 11

| Neoantigen | | | SEQ ID |
|---|---|---|---|
| ID | Gene(s) | Amino acid sequence | NO: |
| P16 | MSMB- | GVPGDSTRRAVRRMNTF | 343 |
| | NCOA4 | | |
| P17 | MSMB- | GVPGDSTRRAVRRMNTF | 343 |
| | NOCA4 | | |
| P19 | TMEM222- | WTPIPVLTRWPLPHPPPWRRATSC | 347 |
| | LOC644961 | RMARSSPSATSGSSVRRRCSSLPSW | |
| | | VWNLAASTRPRSTPS | |
| P22 | SLC45A3- | SLYHREKQLIAMDSAI | 349 |
| | ELK4 | SLYHREKQLIAMDSAITLW | 1003 |
| P27 | FAM126B- | LHPQRETFTPRWSGANYWKLAFPV | 351 |
| | ORC2 | GAEGTFPAAATQRGVVRPA | |
| P35 | TMPRSS2- | NSKMALNSLNSIDDAQLTRIAPPRS | 353 |
| | ERG | HCCFWEVNAP | |
| P37 | TSTD1-F11R | MAGGVLRRLLCREPDRDGDKGAS | 355 |
| | | REETVVPLHIGDPVVLPGIGQCYSA | |
| | | LF | |
| P46 | TP53 (R213D) | DDRNTFDIVWWCPMSRLRLALTV | 357 |
| | | PPSTTTTCVTVPAWAA | |
| P48 | AR.p.H875Y | VQPIARELYQFTFDLLI | 359 |
| P50 | AR (W742C) | QMAVIQYSCMGLMVFAM | 361 |
| P56 | SPOP (F102C) | PKSEVRAKCKFSILNAK | 363 |
| P58 | AR (Q903H) | MMAEIISVHVPKILSGK | 365 |
| P59 | FOXA1 | LHPDSGNMVENGCYLRR | 367 |
| | (F254V) | | |
| P60 | FOXA1.p.F266 | CYLRRQKRLKCEKQPGA | 369 |
| | L | | |
| P61 | FOXA1.p.R261 | MFENGCYLGRQKRFKCE | 371 |
| | G | | |
| P73 | TP53 (G266E) | DSSGNLLERNSFEVRV | 373 |
| P76 | AR-V3 | VFFKRAAEGFFRMNKLKESSDTNP | 375 |
| | | KPYCMAAPMGLTENNRNRKKSYR | |
| | | ETNLKAVSWPLNHT | |
| P77 | AR-V3 | VFFKRAAEGFFRMNKLKESSDTNP | 375 |
| | | KPYCMAAPMGLTENNRNRKKSYR | |
| | | ETNLKAVSWPLNHT | |
| P82 | AR-V7 | YEAGMTLGEKFRVGNCKHLKMTR | 379 |
| | | P | |
| P87 | AR-Intron | YEAGMTLGGKILFFLFLLLPLSPFS | 381 |
| | | LIF | |
| P97 | FOXRED2- | GYLRMQGLMAQRLLLR | 383 |
| | TXN2 | | |
| P98 | TP53 (R213D) | DDRNTFDIVWWCPMSRLRLALTV | 357 |
| | | PPSTTTTCVTVPAWAA | |

TABLE 12

| Neoantigen | | | SEQ ID |
|---|---|---|---|
| ID | Gene(s) | Nucleotide sequence | NO: |
| P16 | MSMB- | GGAGTTCCAGGAGATTCAACCAG | 344 |
| | NCOA4 | GAGAGCAGTGAGGAGAATGAATA | |
| | | CCTTC | |
| P17 | MSMB- | GGAGTTCCAGGAGATTCAACCAG | 344 |
| | NOCA4 | GAGAGCAGTGAGGAGAATGAATA | |
| | | CCTTC | |
| P19 | TMEM222- | TGGACGCCCATCCCGGTGCTCAC | 348 |
| | LOC644961 | GAGATGGCCACTACCACATCCTC | |
| | | CTCCCTGGAGAAGAGCTACAAGC | |
| | | TGCCGGATGGCCAGGTCATCACC | |
| | | ATCAGCAACAAGCGGTTCCAGTG | |
| | | TCCGGAGGCGCTGTTCCAGCCTTC | |
| | | CTTCCTGGGTATGGAATCTTGCGG | |
| | | CATCCACGAGACCACGTTCAACT | |
| | | CCATCATGAA | |
| P22 | SLC45A3- | TCCCTCTACCACCGGGAGAAGCAG | 350 |
| | ELK4 | CTCATTGCTATGGACAGTGCTAT | |
| | | CTCCCTCTACCACCGGGAGAAGCA | 1002 |
| | | GCTCATTGCTATGGACAGTGCTAT | |
| | | CACCCTGTGG | |
| P27 | FAM126B- | CTTCATCCTCAGAGGGAAACATT | 352 |
| | ORC2 | CACTCCCCGGTGGTCGGGCGCGA | |
| | | ATTACTGGAAATTGGCTTTTCCCG | |
| | | TTGGGGCCGAAGGTACCTTCCCT | |
| | | GCGGCGGCGACTCAGCGGGGTGT | |
| | | CGTTCGGCCGGCGTG | |
| P35 | TMPRSS2- | AACAGCAAGATGGCTTTGAACTC | 354 |
| | ERG | ATTAAACTCCATTGATGATGCAC | |
| | | AGTTGACAAGAATTGCCCCTCCA | |
| | | AGATCTCATTGCTGTTTCTGGGAA | |
| | | GTAAACGCTCCT | |
| P37 | TSTD1-F11R | ATGGCTGGAGGAGTCCTTCGGCG | 356 |
| | | GCTGTTGTGTCGGGAGCCTGATC | |
| | | GCGATGGGGACAAAGGCGCAAGT | |
| | | CGAGAGGAAACTGTTGTGCCTCT | |
| | | TCATATTGGCGATCCTGTTGTGCT | |
| | | CCCTGGCATTGGGCAGTGTTACA | |
| | | GTGCACTCTTCT | |
| P46 | TP53 (R213D) | GATGACAGAAACACTTTCGACAT | 358 |
| | | AGTGTGGTGGTGCCCTATGAGCC | |
| | | GCCTGAGGTTGGCTCTGACTGTAC | |
| | | CACCATCCACTACAACTACATGT | |
| | | GTAACAGTTCCTGCATGGGCGGC | |
| | | ATGA | |
| P48 | AR.p.H875Y | GTGCAGCCTATTGCGAGAGAGCT | 360 |
| | | GCATCAGTTCACTTTTGACCTGCT | |
| | | AATC | |
| P50 | AR (W742C) | CAGATGGCTGTCATTCAGTACTCC | 362 |
| | | TGCATGGGGCTCATGGTGTTTGCC | |
| | | ATG | |
| P56 | SPOP (F102C) | CAAAGAGTGAAGTTCGGGCAAAA | 364 |
| | | TTCAAATGCTCCATCCTGAATGCC | |
| | | AAG | |
| P58 | AR (Q903H) | ATGATGGCAGAGATCATCTCTGT | 366 |
| | | GCACGTGCCCAAGATCCTTTCTGG | |
| | | GAAA | |
| P59 | FOXA1 | CTGCACCCGGACTCCGGCAACAT | 368 |
| | (F254V) | GGTCGAGAACGGCTGCTACTTGC | |
| | | GCCGC | |
| P60 | FOXA1.p.F266 | TGCTACTTGCGCCGCCAGAAGCG | 370 |
| | L | CTTGAAGTGCGAGAAGCAGCCGG | |
| | | GGGCC | |
| P61 | FOXA1.p.R261 | ATGTTCGAGAACGGCTGCTACTT | 372 |
| | G | GGGCCGCCAGAAGCGCTTCAAGT | |
| | | GCGAG | |
| P73 | TP53 (G266E) | GACTCCAGTGGTAATCTACTGGA | 374 |
| | | ACGGAACAGCTTTGAGGTGCGTG | |
| | | TT | |
| P76 | AR-V3 | GTCTTCTTCAAAAGAGCCGCTGA | 376 |
| | | AGGATTTTTCAGAATGAACAAAT | |
| | | TAAAAGAATCATCAGACACTAAC | |
| | | CCCAAGCCATACTGCATGGCAGC | |
| | | ACCAATGGGACTGACAGAAAACA | |
| | | ACAGAAATAGGAAGAAATCCTAC | |
| | | AGAGAAACAAACTTGAAAGCTGT | |
| | | CTCATGGCCTTTGAATCATACT | |
| P77 | AR-V3 | GTCTTCTTCAAAAGAGCCGCTGA | 376 |
| | | AGGATTTTTCAGAATGAACAAAT | |
| | | TAAAAGAATCATCAGACACTAAC | |
| | | CCCAAGCCATACTGCATGGCAGC | |
| | | ACCAATGGGACTGACAGAAAACA | |
| | | ACAGAAATAGGAAGAAATCCTAC | |
| | | AGAGAAACAAACTTGAAAGCTGT | |
| | | CTCATGGCCTTTGAATCATACT | |
| P82 | AR-V7 | TATGAAGCAGGGATGACTCTGGG | 380 |
| | | AGAAAAATTCCGGGTTGGCAATT | |
| | | GCAAGCATCTCAAAATGACCAGA | |
| | | CCC | |
| P87 | AR-Intron | TATGAAGCAGGGATGACTCTGGG | 382 |
| | | AGGTAAGATACTTTTCTTTCTCTT | |
| | | CCTCCTCCTTCCTCTCTCCCCCTTC | |
| | | TCCCTCATTTTC | |
| P97 | FOXRED2- | GGGTACCTGAGGATGCAGGGACT | 384 |
| | TXN2 | CATGGCTCAGCGACTTCTTCTGAGG | |
| P98 | TP53 (R213D) | GATGACAGAAACACTTTCGACAT | 358 |
| | | AGTGTGGTGGTGCCCTATGAGCC | |
| | | GCCTGAGGTTGGCTCTGACTGTAC | |
| | | CACCATCCACTACAACTACATGT | |
| | | GTAACAGTTCCTGCATGGGCGGC | |
| | | ATGA | |

### Example 4. HLA Binding Predictions

[0912] The amino acid sequences of the neoantigens identified using the various approaches as described in Example 3 were split into all possible unique, contiguous 9 mer amino acid fragments and HLA binding predictions to six common HLA alleles (HLA-A*01:01, HLA-A*02:01, HLA-A*03:01, HLA-A*24:02, HLA-B*07:02, HLA-B*08:01) were performed for each of these 9 mers using netMHCpan4.0. Several 9 mer fragments were selected for further analysis based on ranking by likelihood of binding to one or more of the tested HLA alleles and their prevalence in prostate cancer patients.

[0913] Table 13 shows the amino acid sequences of select 9 mer fragments and their neoantigen origin. Table 14 shows the prevalence of neoantigens in the analyzed cohorts.

TABLE 13

| | | | Amino acid | SEQ ID |
|---|---|---|---|---|
| Neoantigen | | | sequence or | NO: of the |
| ID | Gene(s) | Type | 9-mer | 9mer |
| P16 | MSMB-NCOA4 | Fusion | STRRAVRRM | 387 |
| P17 | MSMB-NOCA4 | Fusion | RAVRRMNTF | 388 |
| P19 | TMEM222- | Fusion | IPVLTRWPL | 389 |
| | LOC644061 | | | |
| P22 | SLC45A3-ELK4 | Fusion | QLIAMDSAI | 390 |
| P27 | FAM126B-ORC2 | Fusion | FPVGAEGTF | 391 |
| P35 | TMPRSS2-ERG | Fusion | NSKMALNSL | 392 |
| P37 | TSTD1-F11R | Fusion | GVLRRLLCR | 393 |
| P46 | TP53 (R213D) | Frameshift | CPMSRLRLA | 394 |
| | | Mutation | | |
| P48 | AR.p.H875Y | Missense | YQFTFDLLI | 395 |
| | | Mutation | | |
| P50 | AR (W742C) | Missense | IQYSCMGLM | 396 |
| | | Mutation | | |
| P56 | SPOP (F102C) | Missense | RAKCKFSIL | 397 |
| | | Mutation | | |
| P58 | AR (Q903H) | Missense | HVPKILSGK | 398 |
| | | Mutation | | |
| P59 | FOXA1 (F254V) | Missense | NMVENGCYL | 399 |
| | | Mutation | | |
| P60 | FOXA1.p.F266L | Missense | YLRRQKRLK | 400 |
| | | Mutation | | |
| P61 | FOXA1.p.R261G | Missense | CYLGRQKRF | 401 |
| | | Mutation | | |
| P73 | TP53 (G266E) | Missense | LLERNSFEV | 402 |
| | | Mutation | | |
| P76 | AR-V3 | Splice Variant | YCMAAPMGL | 403 |
| P77 | AR-V3 | Splice Variant | FFKRAAEGF | 404 |
| P82 | AR-V7 | Splice Variant | RVGNCKHLK | 405 |
| P87 | AR-Intron | Splice Variant | FLFLLLPLS | 406 |
| P97 | FOXRED2-TXN2 | Fusion | LMAQRLLLR | 407 |
| P98 | TP53 (R213D) | Frameshift | IVWWCPMSR | 408 |
| | | Mutation | | |

TABLE 14

| Neoantigen | | Prevalence | |
|---|---|---|---|
| ID | Gene | TCGA | SU2C |
| P16 | MSMB-NCOA4 | 27.16% | 23.25% |
| P17 | MSMB-NOCA4 | 27.16% | 23.25% |
| P19 | TMEM222-LOC644961 | N.O. | 13.95% |
| P22 | SLC45A3-ELK4 | 17.71% | 13.95% |
| P27 | FAM126B-ORC2 | 5.11% | 18.60% |
| P35 | TMPRSS2-ERG | 2.75% | 11.62% |
| P37 | TSTD1-F11R | 16.33% | 9.30% |
| P46 | TP53 (R213D) | N.O. | 1% |
| P48 | AR.p.H875Y | N.O. | 1% |
| P50 | AR (W742C) | N.O. | 1.25% |
| P56 | SPOP (F102C) | 0.40% | 2.00% |
| P58 | AR (Q903H) | N.O. | 1.00% |
| P59 | FOXA1 (F254V) | 0.20% | 1.00% |
| P60 | FOXA1.p.F266L | 0.20% | 1% |
| P61 | FOXA1.p.R261G | 0.20% | 1% |
| P73 | TP53 (G266E) | N.O. | 1% |
| P76 | AR-V3 | Present | Present |
| P77 | AR-V3 | Present | Present |
| P82 | AR-V7 | Present | Present |
| P87 | AR-Intron | Present | Present |
| P97 | FOXRED2-TXN2 | 3.74% | 11.62% |
| P98 | TP53 (R213D) | 0.00% | 1.00% |

NO: not observed;
Present: AR splice variants were expressed at variable levels and hence prevalence was not determined

### Example 5 Immunogenicity Assessment of Neoantigens

[0914] The 9 mer fragments shown in Table 13 were assessed for their ability to activate T cells using the Patient PBMC restimulation assay described in Example 1 using TNFα and IFNγ production by CD8⁺ T cells as a readout. Self-antigens shown in Table 15 were also used in the assays. FIG. 5A, FIG. 5B, FIG. 5C, FIG. 5D and FIG. 5E show flow cytometry dot plots depicting TNFα⁺IFNγ⁺CD8⁺ T cell frequencies in PBMC samples after no stimulation (DMSO negative control) (FIG. 5A), after stimulation with CEF peptide (positive control (FIG. 5B), after stimulation with P16 (FIG. 5C), after stimulation with P98 (FIG. 5D), and after stimulation with P3 (FIG. 5E). Table 16 shows the maximum frequency of TNFα⁺IFNγ⁺CD8⁺ T cells and maximum fold change over negative control for each peptide analyzed, indicating the highest frequency of TNFα⁺IFNγ⁺CD8⁺ T cells and resulting fold change across the PBMC donors evaluated for the peptide. All neoantigens evaluated were found to stimulate CD8⁺ T cells. FIG. 6 shows the number of prostate cancer patients whose PBMC samples demonstrated a positive immune response to the specified neoantigens. PBMCs from ten patients were evaluated.

TABLE 15

| Peptide | | Amino Acid | SEQ ID |
|---|---|---|---|
| ID | Gene name | Sequence of the 9-mer | NO: |
| P3 | ERG | KLSRALRYY | 421 |
| P6 | FOLH1 | MVFELANSI | 422 |
| P7 | ERG | ILFQNIDGK | 423 |
| P9 | FOLH1 | KIVIARYGK | 424 |
| P92 | ERG | FLLELLSDS | 425 |

TABLE 16

| | Maximum fold | Maximum | |
|---|---|---|---|
| | change over | frequency of | |
| Peptide | negative | TNFα⁺IFNγ⁺CD8⁺ | |
| Name | control | T cells (Percent) | Immunogenic |
| Negative | n/a | 0.011-0.8 (depending | n/a |
| control | | on patient) | |
| P16 | 65.82 | 4.620 | Yes |
| P17 | 2.17 | 0.130 | Yes |
| P19 | 5.00 | 0.480 | Yes |
| P22 | 5.00 | 0.120 | Yes |
| P27 | 3.43 | 0.430 | Yes |
| P35 | 2.67 | 0.064 | Yes |
| P37 | 3.13 | 1.160 | Yes |
| P46 | 2.33 | 0.140 | Yes |
| P48 | 2.33 | 0.220 | Yes |
| P50 | 5.14 | 0.190 | Yes |
| P56 | 11.57 | 1.620 | Yes |
| P58 | 19.18 | 5.370 | Yes |
| P59 | 10.75 | 3.010 | Yes |
| P60 | 2.08 | 0.340 | Yes |
| P61 | 2.27 | 0.084 | Yes |
| P73 | 2.97 | 0.110 | Yes |
| P76 | 2.30 | 0.170 | Yes |
| P77 | 3.24 | 0.160 | Yes |
| P82 | 3.46 | 0.970 | Yes |
| P87 | 3.24 | 0.120 | Yes |
| P97 | 4.55 | 0.160 | Yes |
| P98 | 14.93 | 1.000 | Yes |

Maximum frequency refers to the greatest frequency of TNFα⁺IFNγ⁺CD8⁺ T cells among all tested PBMC donors

### Example 6. Binding of Neoantigens to HLA

[0915] Binding of select neoepitopes to HLA-A*01:01, HLA-A*02:01, HLA-A*03:01, HLA-A*24:02, HLA-B*07:02 and HLA-B*08:01 was evaluated using the assay described in Example 1. The results of binding the various neoantigens to HLA is shown in Table 17. Each HLA allele tested had a corresponding positive control (Pos) and a negative control (Neg) peptide against which the peptide of interest was exchanged. An exchange rate of 100% with Pos, thus means that the peptide of interest has the same binding affinity to the HLA allele as the positive control peptide. As a criterion for further evaluation, peptides with an exchange rate of at least 10% with the corresponding Pos peptide for at least one of the 6 HLA alleles that we considered for further evaluation. The exchange rates with the allele specific Pos peptides, of the 24 neoantigens so identified are summarized below in Table 17. Higher percentages correspond to stronger binding to the HLA allele.

TABLE 17

| Peptide | HLA- | HLA- | HLA- | HLA- | HLA- | HLA- |
|---|---|---|---|---|---|---|
| Name | A*01:01 | A*02:01 | A*03:01 | A*24:02 | B*07:02 | B*08:01 |
| P16 | 5.5 | 10.4 | 6.1 | 0.8 | 13.7 | 6.2 |
| P17 | 4.9 | 9.3 | 3.8 | 0.1 | 38.7 | 9 |
| P19 | 5.2 | 8.2 | 4.1 | 0.1 | 91.3 | 14.5 |
| P22 | 4.4 | 46.9 | 4.8 | 0 | 8.3 | 3.9 |
| P27 | 4.8 | 10 | 4.5 | 0.7 | 7.8 | 6.4 |
| P35 | 2.5 | 12.5 | 4.2 | 0.2 | 12.1 | 13.7 |
| P37 | 1.4 | 12.5 | 6.4 | −0.1 | 9.4 | 3.3 |
| P46 | 2.4 | 14.4 | 10.3 | −0.4 | 64.8 | 14.5 |
| P48 | 4.3 | 99.3 | 4.4 | 0.1 | 12.8 | 8.9 |
| P50 | 2.3 | 8.8 | 5.5 | 0.1 | 10.4 | 4.7 |
| P56 | 2.6 | 8.4 | 6.8 | 0.5 | 82.5 | 38 |
| P58 | 2.5 | 11.8 | 32.5 | 0.2 | 9.7 | 5.3 |
| P59 | 2.2 | 11.9 | 4.5 | −0.5 | 7.5 | 5.5 |
| P60 | 3.1 | 7.9 | 36.6 | 0.9 | 6.1 | 10.2 |
| P61 | 1.7 | 5.8 | 2.1 | 90.3 | 9.6 | 3.6 |
| P73 | 2.1 | 89.2 | 3.5 | 0.5 | 8.7 | 2.6 |
| P76 | 0.1 | 85.9 | 6 | −0.5 | 91.5 | 8.5 |
| P77 | 1.9 | 9.6 | 2.8 | 1.7 | 14.2 | 3.4 |
| P82 | 1.5 | 6.3 | 58.1 | −0.1 | 12.9 | 1.4 |
| P87 | 1.1 | 64 | 2.4 | 0.2 | 5 | 3.1 |
| P97 | 2.5 | 4.6 | 39 | 0.1 | 7 | 2.7 |
| P98 | 2.5 | 7.9 | 51.1 | −0.1 | 6.7 | 2.4 |

### Example 7. MHC I-Peptide Complex Profiling of Prostate Cancer Tissues Identified Unique MHC I-Presented Peptides in Prostate Cancer

[0916] MHC I-peptide complexes were isolated from samples of 11 human prostate cancer and peptides presented by MHC I were identified using unbiased mass spectrometry. At collection, the subjects were diagnosed with grade 7 adenocarcinoma or stromal sarcoma with two subject having invasive adenocarcinoma.

[0917] Frozen human prostate cancer tissues with HLA-A*02:01, HLA-A*03:03, HLA-B*27:0 and HLA-B*08:01 haplotypes were mechanically disrupted in non-ionic detergent including protease inhibitors and processed. A pan-MHC allele monoclonal antibody was used to immunopurify MHC I-peptide complexes from the samples. After acid elution, recovery of the MHC I-peptide complexes was assessed by ELISA and recovered peptides desalted and subjected to LC-MS/MS analyses.

[0918] The raw LC-MS/MS data files from prostate tumors were analyzed to search against the neoantigen database that was created from corresponding RNAseq data obtained from the 11 human prostate cancer samples. These peptides had a theoretical mass for parent ions (MS1) and a list of theoretical fragment ions (MS2). A list of MS1 ions that had triggered MS2 scans were searched against the theoretical list of peptides and matched by mass. All theoretical peptides within a set MS1 ppm mass accuracy (5 ppm) then had their in silico MS2 spectrum compared to the empirical MS2 for that parent ion (peptide spectral matches or PSMs). A score was computed based on how closely the empirical spectrum matched the theoretical spectrum. Each LC-MS/MS run (one file per tumor sample) produced thousands of PSMs. However, the vast majority of these peptides were canonical sequences that were found in the human reference database (Swissprot). These were filtered out and peptides of interest (putative neoantigens) were compiled. From this list, peptides that had sufficient evidence for being positive were selected.

[0919] Table 18 shows the amino acid sequences of the peptides identified in complex with MHC I using LC-MS/MS and the gene origin of the peptides.

[0920] Table 19 shows the amino acid sequences of the corresponding longer neoantigens of the peptides identified in complex with MHC I using LC/MS/MS.

[0921] Table 20 shows the polynucleotide sequences encoding the corresponding longer neoantigens.

[0922] The MHC I complexed peptides described herein confirmed the expression, processing, and presentation of immunogenic epitopes specific to prostate cancer aberrant gene alterations. Evaluation of RNAseq databases mapped the identified MHC I complexed peptides within longer aberrant transcripts present in prostate cancer. Hence, these data identified prostate cancer neoantigens that contained at least one MHC class I epitope that is immunologically relevant and capable of eliciting an adaptive T cell response.

TABLE 18

| Neoantigen | Amino acid | SEQ ID | | |
|---|---|---|---|---|
| ID | sequence | NO: | Gene | type |
| MS1 | VTFLKPCFLL | 426 | TTLL7 | Alternative 5′ SS |
| MS2 | TDIVKQSV | 427 | CHD7 | Alternative Last Exon |
| MS3 | SPAFPKPVRP | 428 | TESK1 | Alternative Last Exon |
| MS4 | SYFSLTNIFNFV | 429 | PPIP5K2 | Alternative Last Exon |
| MS5 | EFSPETCAFRLS | 430 | SRPK2 | Alternative Last Exon |
| MS6 | FLSRALRAL | 431 | SOAT1 | Alternative 5′ SS |
| MS7 | KKDLELIL | 432 | PDE4D | Alternative Last Exon |
| MS8 | KLQKNCLL | 433 | ZYG11A | Exon Skip |
| MS9 | SALSGNSWV | 434 | SYNE2 | Alternative Last Exon |
| MS10 | TVRAILL | 435 | USP21 | Intron Retention |
| MS11 | GSLHFHEVLK | 436 | TDG | Novel Cassette |

TABLE 19

| | | | Peptide |
|---|---|---|---|
| Neoantigen | | | SEQ ID |
| ID | Gene ID | Peptide Sequence | NO: |
| MS1 | TTLL7 | HYKLIQQPISLFSITDRLHKTFSQLPSVHL | 437 |
| | | CSITFQWGHPPIFCSTNDICVTANFCISVTF | |
| | | LKPCFLLHEASASQ | |
| MS2 | CHD7 | WTDIVKQSVSTNCISIKKGSYTKLFSLVFL | 438 |
| | | IFCWPLIIQL | |
| MS3 | TESK1 | RTALTHNQDFSIYRLCCKRGSLCHASQAR | 439 |
| | | SPAFPKPVRPLPAPITRITPQLGGQSDSSQP | |
| | | LLTTGRPQGWQDQALRHTQQASPASCATI | |
| | | TIPIHSAALGDHSGDPGPAWDTCPPLPLTT | |
| | | LIPRAPPPYGDSTARSWPSRCGPLG | |
| MS4 | PPIP5K2 | LRYGALCNVSRISYFSLTNIFNFVIKSLTAI | 440 |
| | | FTVKF | |
| MS5 | SRPK2 | RKERNIRKSESTLRLSPFPTPAPSGAPAAA | 441 |
| | | QGKVVRVPGPAGGLVPRDAGARLLPPAG | |
| | | GPGGGAAAGEGRAGRGRFPSITEPRPRDL | |
| | | PPRVATGRRAGGRRKGAGQGVRTRPLPA | |
| | | SWPGGRGPFRKGPRRLPLGSGPPAAGVQR | |
| | | LRCSHLSRGPRRRRGRVCGRACVSPPLPPR | |
| | | PPPVGLSAENLSWLSSGLPRACSWREFSPE | |
| | | TCAFRLSGLDSKLSARVERDLGALRAPGS | |
| | | RAAQGGGRVRGSRSEWKTRPWRPPPAWP | |
| | | LTRAGGPLPKNPFLESCSETAQRRRVFSFS | |
| | | TPLS | |
| MS6 | SOAT1 | YAYKDFLWCFPFSLVFLQEIQICCHVSCLC | 442 |
| | | CICCSTRICLGCLLELFLSRALRALHVLWN | |
| | | GFQLHCQ | |
| MS7 | PDE4D | SINKATITGKKDLELILHVSRKKPFLPRVN | 443 |
| | | ITPTPISCCNLKMLKKFFLLYIIISIIDLTNCL | |
| | | SCYLEHFYRFTFFTDVHYF | |
| MS8 | ZYG11A | TMPAILKLQKNCLLSL | 444 |
| MS9 | SYNE2 | PYYSALSGNSWVPSTLESDPFGYVFSPLA | 445 |
| | | TRPALNDQESILWPTLTSVVSCALSCPSLN | |
| | | LPENWLTLITGGMKGGKKMKFTFRH | |
| MS10 | USP21 | GLRNLGNTVRAILLSFLSKRNVKWCWG | 446 |
| | | WGKPTSLGKACGRRALKLF | |
| MS11 | TDG | MEAENAGSLHFHEVLKMGHVKF | 447 |

TABLE 20

| | | | DNA |
|---|---|---|---|
| Neoantigen | Gene | | SEQ ID |
| ID | ID | Polynucleotide sequence | NO: |
| MS1 | TTLL7 | CACTACAAATTAATTCAACAACCCATATCCCT | 448 |
| | | CTTCTCCATCACTGATAGGCTCCATAAGACGTT | |
| | | CAGTCAGCTGCCCTCGGTCCATCTCTGCTCAAT | |
| | | CACCTTCCAGTGGGGACACCCGCCCATTTTCTG | |
| | | CTCAACAAATGATATCTGTGTCACGGCCAACTT | |
| | | CTGCATCTCGGTCACATTCCTTAAACCGTGCTT | |
| | | CCTCCTACATGAGGCATCTGCCTCACAG | |
| MS2 | CHD7 | TGGACTGATATAGTTAAGCAGTCTGTAAGTA | 449 |
| | | CAAACTGCATTTCTATCAAGAAAGGTAGCTAT | |
| | | ACAAAACTGTTTTCCTTAGTCTTTCTTATTTTCT | |
| | | GTTGGCCATTAATTATTCAGTTG | |
| MS3 | TESK1 | AGGACCGCCCTGACACACAATCAGGACTTCT | 450 |
| | | CTATCTACAGGCTCTGTTGCAAGAGGGGGTCC | |
| | | CTCTGCCACGCTTCCCAGGCCAGATCCCCGGCT | |
| | | TTCCCGAAGCCGGTCAGACCTCTTCCTGCCCCC | |
| | | ATCACCAGAATCACCCCCCAACTGGGGGGACA | |
| | | ATCTGACTCGAGTCAACCCCTTCTCACTACGGG | |
| | | AAGACCTCAGGGGTGGCAAGATCAAGCTCTTA | |
| | | GACACACCCAGCAAGCCAGTCCTGCCTCTTGT | |
| | | GCCACCATCACCATTCCCATCCACTCAGCTGCC | |
| | | CTTGGTGACCACTCCGGAGACCCTGGTCCAGC | |
| | | CTGGGACACCTGCCCGCCGCTGCCGCTCACTA | |
| | | CCCTCATCCCCCGAGCTCCCCCGCCGTATGGAG | |
| | | ACAGCACTGCCAGGTCCTGGCCCTCCCGCTGT | |
| | | GGGCCCCTCGGC | |
| MS4 | PPIP5K2 | CTTCGCTATGGTGCCTTATGCAATGTAAGTA | 451 |
| | | GAATAAGTTATTTCAGTCTAACAAATATATTTA | |
| | | ATTTTGTAATTAAATCACTAACTGCTATTTTTA | |
| | | CTGTGAAATTT | |
| MS5 | SRPK2 | CGAAAAGAGAGAAACATCCGAAAAAGTGAG | 452 |
| | | TCCACGCTGCGCCTGTCCCCGTTCCCCACCCCC | |
| | | GCCCCGTCGGGGGCGCCCGCGGCCGCGCAGGG | |
| | | GAAAGTTGTCCGGGTCCCCGGGCCGGCGGGCG | |
| | | GGCTGGTCCCCCGGGACGCTGGCGCTCGGCTC | |
| | | CTGCCCCCGGCGGGCGGCCCGGGGGGAGGGGC | |
| | | GGCGGCGGGGGAGGGGCGCGCGGGCCGCGGC | |
| | | CGGTTCCCTAGCATCACGGAGCCTCGACCCCG | |
| | | CGACCTCCCGCCCCGGGTCGCCACCGGCCGGC | |
| | | GGGCGGGAGGCCGGCGGAAAGGCGCCGGGCA | |
| | | GGGCGTGCGCACCCGTCCCTTGCCCGCGAGCT | |
| | | GGCCCGGGGGTCGCGGCCCTTTCCGGAAGGGG | |
| | | CCCCGGCGTCTGCCGCTGGGCTCCGGCCCGCC | |
| | | CGCTGCGGGAGTGCAGCGGCTGCGTTGCTCCC | |
| | | ACCTGAGCCGCGGGCCGAGGAGGCGGAGGGG | |
| | | CCGAGTGTGCGGGAGGGCGTGTGTCTCGCCTC | |
| | | CCCTTCCTCCCCGGCCCCCGCCTGTCGGCCTTT | |
| | | CTGCTGAGAACCTAAGCTGGTTGTCAAGTGGT | |
| | | TTGCCTCGGGCGTGTTCCTGGCGCGAGTTCAGC | |
| | | CCCGAGACCTGTGCGTTTCGGCTCTCGGGTTTG | |
| | | GATTCGAAACTTTCCGCTCGGGTTGAGCGTGA | |
| | | CTTGGGTGCGCTGCGGGCGCCGGGGTCGCGGG | |
| | | CTGCGCAGGGCGGTGGGCGTGTGCGCGGGAGC | |
| | | CGGTCGGAGTGGAAAACGCGCCCGTGGCGGCC | |
| | | ACCTCCAGCCTGGCCGCTCACCCGAGCAGGGG | |
| | | GGCCGCTGCCCAAGAACCCTTTCCTGGAGAGC | |
| | | TGCTCCGAGACCGCACAGCGCCGCCGCGTCTT | |
| | | CTCCTTTTCCACTCCTCTCTCC | |
| MS6 | SOAT1 | TATGCTTACAAGGACTTTCTCTGGTGTTTTCC | 453 |
| | | TTTTTCTTTAGTTTTTCTCCAAGAGATTCAAATC | |
| | | TGCTGCCATGTTAGCTGTCTTTGCTGTATCTGC | |
| | | TGTAGTACACGAATATGCCTTGGCTGTTTGCTT | |
| | | GAGCTTTTTCTATCCCGTGCTCTTCGTGCTCTTC | |
| | | ATGTTCTTTGGAATGGCTTTCAACTTCATTGTC | |
| | | AA | |
| MS7 | PDE4D | TCCATCAACAAAGCCACCATAACAGGTAAGA | 454 |
| | | AAGATCTGGAGCTTATTCTTCATGTGTCTAGGA | |
| | | AGAAACCATTTCTGCCAAGAGTCAATATAACA | |
| | | CCAACACCAATTTCATGCTGCAATTTGAAAAT | |
| | | GTTAAAGAAATTCTTTCTTCTCTACATTATCAT | |
| | | TTCTATCATTGATCTCACAAATTGTCTAAGCTG | |
| | | TTATTTGGAACATTTTTACCGATTTACGTTTTTT | |
| | | ACTGATGTACATTATTTT | |
| MS8 | ZYG11A | ACCATGCCTGCTATTTTAAAGTTACAGAAGA | 455 |
| | | ATTGTCTTCTCTCCTTA | |
| MS9 | SYNE2 | CCATACTACAGCGCACTGTCAGGTAACAGCT | 456 |
| | | GGGTTCCCAGCACCCTGGAAAGTGACCCGTTT | |
| | | GGCTATGTTTTTAGCCCCTTAGCAACACGGCCA | |
| | | GCTCTCAATGACCAAGAGTCCATCTTGTGGCC | |
| | | GACCCTGACTTCTGTGGTTTCCTGTGCTCTATC | |
| | | CTGCCCATCTCTTAACTTACCTGAGAATTGGCT | |
| | | CACTCTCATCACAGGTGGAATGAAAGGGGGAA | |
| | | AAAAAATGAAATTCACATTCAGACAC | |
| MS10 | USP21 | GGCCTTCGAAACCTGGGAAACACGGTGAGA | 457 |
| | | GCTATTCTCCTATCTTTCCTCTCTAAAAGGAAT | |
| | | GTGAAATGGTGCTGGGGGTGGGGAAAACCCAC | |
| | | GAGCTTGGGGAAGGCATGTGGAAGGAGAGCTC | |
| | | TGAAGCTCTTC | |
| MS11 | TDG | ATGGAAGCGGAGAACGCGGGCAGTTTGCAT | 458 |
| | | TTTCATGAAGTGCTCAAAATGGGACATGTGAA | |
| | | ATTC | |

### Example 8. Expression Profiling of Prostate Neoantigens in Tumor and Normal Tissues

[0923] The identified prostate neoantigens were profiled for their expression in about 90 FFPE tissue samples from prostate cancer (adenocarcinoma, clinical stages II-IV, Gleason score 8-9, subjects were treatment naïve or treated with CASODEX® (bicalutamide), LUPRON DEPOT® (leuprolide acetate for depot suspension) or FIRMAGON® (degarelix)) and a panel of normal tissues including liver, kidney, pancreas, ovary, prostate, mammary gland, colon, stomach, skeletal muscle and lung, in PBMCs obtained from healthy subjects and in prostate cancer cell lines including DU145-1, MDA-MB-436-1, LREX-1, 22RV1-1, H660-1. And other tissue cell lines including NCI-H2106-1, L-363-1, HCI-N87-1, OCI-AML5-1, MDA-PCa-2b-1 and GDM-1-1. Total RNA was extracted from formalin fixed paraffin embedded tissue samples using CELLDATA's RNAstorm-RNA isolation kit following kit protocol. RNA from cultured cell lines and PBMCs were isolated using Qiagen RNA isolation kits using standard methods. 200 ng of Total RNA from FFPE samples was used to prepare cDNA using High-capacity cDNA reverse transcription kit (ABI) and standard protocols. 37.5 ng cDNA was preamplified with gene markers in 15 μl preamplification mix using TaqMan preamplification kit (ThermoFisher Scientific) and standard protocols. To test gene expression of the identified neoantigens in the various samples, primers spanning the breakpoint sequences were designed for each of the identified prostate neoantigens and expression was assessed using Fluidigm Biomark™ HD. Percent (%) of expression positive FFPE prostate cancer samples were recorded for each neoantigen with relative average CT calculated in the prostate cancer samples. The results of the expression profiling of select neoantigens is shown in Table 21. The prevalence of each neoantigen in TCGA, SU2C and GTEx database is shown in Table 22.

TABLE 21

| | Amino | | qPCR | | |
|---|---|---|---|---|---|
| Neo- | acid | | % | Relative | Normal |
| antigen | SEQ | Polynucleotide | Positive | Average | Tissue |
| ID | ID NO: | SEQ ID NO: | FFPE | Ct | Expression |
| AS18 | 275 | 276 | 95.6 | 6.3 | Ovary, Prostate |
| P87 | 381 | 382 | 85.6 | 8.3 | Ovary, Prostate |
| AS55 | 333 | 334 | 83.3 | 8.2 | Prostate |
| AS57 | 337 | 338 | 83.3 | 7.9 | Prostate |
| AS15 | 269 | 270 | 68.9 | 11.4 | Ovary, |
| | | | | | Mammary |
| AS7 | 253 | 254 | 57.8 | 11.0 | None |
| AS43 | 309 | 310 | 52.2 | 11.2 | Mammary |
| | | | | | [symbol] |
| AS51 | 325 | 326 | 47.8 | 10.5 | Ovary |
| AS16 | 271 | 272 | 47.8 | 10.8 | Ovary |
| AS41 | 305 | 306 | 45.6 | 11.6 | Ovary |
| AS6 | 251 | 252 | 33.3 | 10.0 | None |
| AS3 | 245 | 246 | 26.7 | 10.8 | None |
| AS11 | 261 | 262 | 25.6 | 12.1 | None |
| AS13 | 265 | 266 | 21.1 | 11.1 | None |
| AS47 | 317 | 318 | 16.7 | 12.3 | Ovary |
| AS8 | 255 | 256 | 13.3 | 12.5 | None |
| AS19 | 277 | 278 | 95.6 | 6.3 | Ovary, Prostate |
| AS37 | 297 | 298 | 0.0 | N/A | None |
| AS23 | 285 | 286 | 22.0 | 13.0 | Ovary, Prostate, |
| | | | | | Mammary |
| | | | | | Gland |
| MS1 | 437 | 448 | N/A | N/A | None |
| MS3 | 439 | 450 | N/A | N/A | None |
| MS6 | 442 | 453 | N/A | N/A | None |
| MS8 | 444 | 455 | N/A | N/A | None |
| P82 | 379 | 380 | 37.0 | 11 | |
| P16 | 343 | 344 | 76 | 9 | Prostate |
| FUS1 | 211 | 212 | 72 | 9 | Prostate |
| P22 | 349 | 350 | 70 | 9 | Prostate |
| FUS2 | 213 | 214 | 55 | 11 | Mammary |
| | | | | | Gland |
| FUS3 | 215 | 216 | 43 | 11 | Prostate |
| FUS6 | 221 | 222 | 19 | 11 | None |
| FUSS | 219 | 220 | 14 | 7 | None |
| FUS8 | 225 | 226 | 11 | 14 | None |
| FUS15 | 345 | 346 | 8 | 13 | None |
| P35 | 353 | 354 | 5 | 13 | None |
| FUS19 | 235 | 236 | 4 | 13 | None |
| FUS7 | 223 | 224 | 0 | N/A | None |
| M84 | 167 | 168 | N/A | N/A | N/A |
| M86 | 171 | 172 | N/A | N/A | N/A |
| M10 | 19 | 20 | N/A | N/A | N/A |
| M12 | 23 | 24 | N/A | N/A | N/A |
| FR1 | 177 | 178 | N/A | N/A | N/A |

[symbol]

indicates data missing or illegible when filed

TABLE 22

| | | Frozen | | | |
|---|---|---|---|---|---|
| | Amino | prostate | | | |
| Neo- | acid | cancer | | | |
| antigen | SEQ | tissues* | TCGA | SU2C | GTEx |
| ID | ID NO: | (n = 11) | % | % | % |
| AS18 | 275 | 54.5 | 12.6 | 20.9 | 0.03 |
| P87 | 381 | 0.0 | 0 | 20.9 | 0 |
| AS55 | 333 | 18.2 | 12.1 | 0 | 0 |
| AS57 | 337 | 36.4 | 14.9 | 0 | 0 |
| AS15 | 269 | 36.4 | 4.5 | 46.5 | 0 |
| AS7 | 253 | 27.3 | 5.1 | 16.3 | 0 |
| AS43 | 309 | 0.0 | 0 | 31 | 0.4 |
| AS51 | 325 | 9.1 | 0 | 23.8 | 0.52 |
| AS16 | 271 | 45.5 | 0.6 | 18.6 | 0 |
| AS41 | 305 | 0.0 | 0 | 33.3 | 0.16 |
| AS6 | 251 | 27.3 | 5.1 | 16.3 | 0 |
| AS3 | 245 | 27.3 | 10.4 | 25.6 | 0.03 |
| AS11 | 261 | 9.1 | 1.2 | 48.8 | 0.07 |
| AS13 | 265 | 27.3 | 5.7 | 32.6 | 0 |
| AS47 | 317 | 0.0 | 0 | 23.8 | 0.05 |
| AS8 | 255 | 0.0 | 0 | 14 | 0 |
| AS19 | 277 | 54.5 | 12.6 | 20.9 | 0.03 |
| AS37 | 297 | 0.0 | 0 | 38.1 | 0 |
| AS23 | 285 | 45.5 | 3.1 | 18.6 | 0.09 |
| MS1 | 437 | 18.2 | 0 | 0 | 0 |
| MS3 | 439 | 9.1 | 0.197 | 0 | 0.13 |
| MS6 | 442 | 9.1 | 0.197 | 0 | 0 |
| MS8 | 444 | 18.2 | 0 | 0 | 0.016 |
| P82 | 379 | | Varied | | |
| | | | Expression | | |
| P16 | 343 | | 27.17 | 2.33 | 0.02 |
| FUS1 | 211 | | 17.72 | 13.95 | #N/A |
| P22 | 349 | | 30.51 | 23.26 | 0.03 |
| FUS2 | 213 | | 63.58 | 46.51 | 1.78 |
| FUS3 | 215 | | 35.04 | 23.26 | 0.02 |
| FUS6 | 221 | | 21.46 | 32.56 | #N/A |
| FUS5 | 219 | | 12.40 | 18.60 | #N/A |
| FUS8 | 225 | | 1.18 | 32.56 | 0.54 |
| FUS15 | 345 | | 0.39 | 9.30 | 0.11 |
| P35 | 353 | | 1.38 | 6.98 | #N/A |
| FUS19 | 235 | | 8.86 | 30.23 | 1.04 |
| FUS7 | 223 | | 3.35 | 16.28 | 0.51 |
| M84 | 167 | | | 1.28 | |
| M86 | 171 | | | 1.09 | |
| M10 | 19 | | | 1.18 | |
| M12 | 23 | | | 0.99 | |
| FR1 | 177 | | | 0.30 | |

### Example 9. Generation of Viral Vectors Encoding the Identified Neoantigens

[0924] The identified neoantigens were validated and prioritized for their inclusion into a universal prostate cancer vaccine. 41 of the identified neoantigens were selected to be included into the expression cassettes based on their expression across prostate cancer samples, low expression in normal tissues, binding to HLA, and immunogenicity. The selected 41 neoantigens are shown in Table 21 and Table 22 and include

AS18
(WKFEMSYTVGGPPPHVHARPRHWKTDR; SEQ ID NO: 275),
P87
(YEAGMTLGGKILFFLFLLLPLSPFSLIF; SEQ ID NO: 381),
AS55
(DGHSYTSKVNCLLLQDGFHGCVSITGAAGRRNLSIFLFLMLCKLE
FHAC; SEQ ID NO: 333),
AS57
(TGGKSTCSAPGPQSLPSTPFSTYPQWVILITEL; SEQ ID NO:
337),
AS15
(VLRFLDLKVRYLHS; SEQ ID NO: 269),
AS7
(DYWAQKEKGSSSFLRPSC; SEQ ID NO: 253),
AS43
(VPFRELKNVSVLEGLRQGRLGGPCSCHCPRPSQARLTPVDVAGPF
LCLGDPGLFPPVKSSI; SEQ ID NO: 309),
AS51
(GMECTLGQVGAPSPRREEDGWRGGHSRFKADVPAPQGPCWGGQPG
SAPSSAPPEQSLLD; SEQ ID NO: 325),
AS16
(GNTTLQQLGEASQAPSGSLIPLRLPLLWEVRG; SEQ ID NO: 271),
AS41
(EAFQRAAGEGGPGRGGARRGARVLQSPFCRAGAGEWLGHQSLR;
SEQ ID NO: 305),
AS6
(DYWAQKEKISIPRTHLC (SEQ ID NO: 251),
AS3
(VAMMVPDRQVHYDFGL (SEQ ID NO: 245),
AS11
(VPFRELKNQRTAQGAPGIHHAASPVAANLCDPARHAQHTRIPCGA
GQVRAGRGPEAGGGVLQPQRPAPEKPGCPCRRGQPRLHTVKMWRA;
SEQ ID NO: 261),
AS13
(KRSFAVTERII; SEQ ID NO: 265),
AS47
(FKKFDGPCGERGGGRTARALWARGDSVLTPALDPQTPVRAPSLTR
AAAAV; SEQ ID NO: 317),
AS8
(LVLGVLSGHSGSRL; SEQ ID NO: 255),
AS19
(QWQHYHRSGEAAGTPLWRPTRN; SEQ ID NO: 277),
AS37
(CHLFLQPQVGTPPPHTASARAPSGPPHPHESCPAGRRPARAAQTC
ARRQHGLPGCEEAGTARVPSLHLHLHQAALGAGRGRGWGEACAQVP
PSRG; SEQ ID NO: 297),
AS23 (KIQNKNCPD; SEQ ID NO: 285),
MS1
(HYKLIQQPISLFSITDRLHKTFSQLPSVHLCSITFQWGHPPIFCS
TNDICVTANFCISVTFLKPCFLLHEASASQ; SEQ ID NO: 437),
MS3
(RTALTHNQDFSIYRLCCKRGSLCHASQARSPAFPKPVRPLPAPITRIT
PQLGGQSDSSQPLLTTGRPQGWQDQALRHTQQASPASCATITIPIHSAA
LGDHSGDPGPAWDTCPPLPLTTLIPRAPPPYGDSTARSWPSRCGPLG;
SEQ ID NO: 439),
MS6
(YAYKDFLWCFPFSLVFLQEIQICCHVSCLCCICCSTRICLGCLLEL
FLSRALRALHVLWNGFQLHCQ; SEQ ID NO: 442),
MS8
(TMPAILKLQKNCLLSL; SEQ ID NO: 444),
P82
(YEAGMTLGEKFRVGNCKHLKMTRP; SEQ ID NO: 379).
P16
(GVPGDSTRRAVRRMNTF; SEQ ID NO: 343),
FUS1
(CGASACDVSLIAMDSA; SEQ ID NO: 211)
or
FUS1
(GASACDVSLIAMDSAITLW; SEQ ID NO: 1001),
P22
(SLYHREKQLIAMDSAI; SEQ ID NO: 349)
or
P22
(SLYHREKQLIAMDSAITLW; SEQ ID NO: 1003),
FUS2
(TEYNQKLQVNQFSESK; SEQ ID NO: 213),
FUS3
(TEISCCTLSSEENEYLPRPEWQLQ; SEQ ID NO: 215),
FUS6
(CEERGAAGSLISCE; SEQ ID NO: 221),
FUS5
(NSKMALNSEALSVVSE; SEQ ID NO: 219),
FUS8
(WGMELAASRRFSWDHHSAGGPPRVPSVRSGAAQVQPKDPLPLRTLAG
CLARTAHLRPGAESLPQPQLHCT; SEQ ID NO: 225),
FUS15
(HVVGYGHLDTSGSSSSSSWP; SEQ ID NO: 345),
P35
(NSKMALNSLNSIDDAQLTRIAPPRSHCCFWEVNAP; SEQ ID NO:
353),
FUS19
(KMHFSLKEHPPPPCPP; SEQ ID NO: 235),
FUS7
(LWFQSSELSPTGAPWPSRRPTWRGTTVSPRTATSSARTCCGTKWPSS
QEAALGLGSGLLRFSCGTAAIR; SEQ ID NO: 223),
M84
(IARELHQFAFDLLIKSH; SEQ ID NO: 167),
M86
(QPDSFAALHSSLNELGE; SEQ ID NO: 171),
M10
(FVQGKDWGLKKFIRRDF; SEQ ID NO: 19),
M12
(FVQGKDWGVKKFIRRDF; SEQ ID NO: 23),
and
FR1
(QNLQNGGGSRSSATLPGRRRRRWLRRRRQPISVAPAGPPRRPNQKPN
PPGGARCVIMRPTWPGTSAFT; SEQ ID NO: 177).

[0925] Expression cassettes were designed for cloning into viral backbones Modified Vaccinia Ankara (MVA) and Great Ape Adenovirus 20 (GAd20) by joining the 41 neoantigen sequences one after the other without any linker. Each neoantigen sequences was codon-optimized for expression in either MVA or GAd20. The optimized polynucleotide sequences are shown in Table 23 for GAd20 and Table 24 for MVA expression. GAd20 and MVA codon optimized sequences can also be used for expression in self-replicating RNA. Any of the optimized polynucleotide sequences shown in Tables 23 and 24, for example, can be cloned into a vector for the generation of a self-replicating RNA molecule as described herein.

TABLE 23

| | | | Codon- | |
|---|---|---|---|---|
| | | | optimized | |
| | | | polynucleotide | |
| | | Amino | for | |
| | | acid | GAd20 | |
| | | SEQ | expression; | Codon-optimized |
| Neoantigen | | ID | SEQ ID | polynucleotide sequence |
| ID | Gene ID | NO: | NO: | for GAd20 expression |
| AS18 | NWD1 | 275 | 459 | TGGAAGTTCGAGATGAGCTACAC |
| | | | | CGTCGGCGGACCTCCACCTCATG |
| | | | | TTCATGCCAGACCTCGGCACTGG |
| | | | | AAAACCGACAGA |
| P87 | AR- | 381 | 460 | TATGAGGCCGGCATGACACTCGG |
| | Intron | | | CGGCAAGATCCTGTTCTTCCTGTT |
| | | | | CCTGCTGCTCCCTCTGAGCCCCTT |
| | | | | CAGCCTGATCTTC |
| AS55 | SPOC | 333 | 461 | GATGGCCACAGCTACACCAGCAA |
| | | | | AGTGAACTGCCTCCTGCTGCAGG |
| | | | | ATGGCTTCCACGGCTGTGTGTCT |
| | | | | ATTACTGGCGCCGCTGGCAGACG |
| | | | | GAACCTGAGCATCTTTCTGTTTCT |
| | | | | GATGCTGTGCAAGCTCGAGTTCC |
| | | | | ACGCCTGC |
| AS57 | KLK3 | 337 | 462 | ACAGGCGGCAAGTCCACATGTTC |
| | | | | TGCCCCTGGACCTCAGAGCCTGC |
| | | | | CTAGCACACCCTTCAGCACATAC |
| | | | | CCTCAGTGGGTCATCCTGATCAC |
| | | | | CGAACTC |
| AS15 | LRRC45 | 269 | 463 | GTGCTGAGATTCCTGGACCTGAA |
| | | | | AGTGCGCTACCTGCACAGC |
| AS7 | ACSM1 | 253 | 464 | GACTATTGGGCTCAAAAAGAGA |
| | | | | AGGGCAGCAGCAGCTTCCTGCGG |
| | | | | CCTAGCTGT |
| AS43 | CPNE7 | 309 | 465 | GTCCCCTTCAGAGAGCTGAAGAA |
| | | | | CGTTTCCGTGCTGGAAGGCCTGA |
| | | | | GACAGGGCAGACTTGGCGGCCCT |
| | | | | TGTAGCTGTCACTGCCCCAGACC |
| | | | | TAGTCAGGCCAGACTGACACCTG |
| | | | | TGGATGTGGCCGGACCTTTCCTG |
| | | | | TGTCTGGGAGATCCTGGCCTGTT |
| | | | | TCCACCTGTGAAGTCCAGCATC |
| AS51 | CPNE7 | 325 | 466 | GGCATGGAATGCACCCTGGGACA |
| | | | | AGTGGGAGCCCCATCTCCTAGAA |
| | | | | GAGAAGAGGATGGCTGGCGCGG |
| | | | | AGGCCACTCTAGATTCAAAGCTG |
| | | | | ATGTGCCCGCTCCTCAGGGCCCT |
| | | | | TGTTGGGGAGGACAACCTGGATC |
| | | | | TGCCCCATCTTCTGCCCCACCTG |
| | | | | AACAGTCCCTGCTGGAT |
| AS16 | LRRC45 | 271 | 467 | GGCAACACAACCCTCCAGCAACT |
| | | | | GGGAGAAGCCTCTCAGGCTCCTA |
| | | | | GCGGCTCTCTGATCCCTCTCAGA |
| | | | | CTGCCTCTCCTGTGGGAAGTTCG |
| | | | | GGGC |
| AS41 | RHPN1 | 305 | 468 | GAGGCTTTCCAAAGAGCTGCTGG |
| | | | | CGAAGGCGGACCTGGTAGAGGT |
| | | | | GGTGCTAGAAGAGGTGCTAGGGT |
| | | | | GCTGCAGAGCCCATTCTGTAGAG |
| | | | | CAGGCGCAGGCGAATGGCTGGG |
| | | | | CCATCAGAGTCTGAGA |
| AS6 | ACSM1 | 251 | 469 | GATTATTGGGCCCAGAAAGAAA |
| | | | | AGATCAGCATCCCCAGAACACAC |
| | | | | CTGTGC |
| AS3 | DNAH8 | 245 | 470 | GTGGCCATGATGGTGCCCGATAG |
| | | | | ACAGGTCCACTACGACTTTGGAC |
| | | | | TG |
| AS11 | CPNE7 | 261 | 471 | GTGCCCTTCCGGGAACTGAAGAA |
| | | | | CCAGAGAACAGCTCAGGGCGCTC |
| | | | | CTGGAATCCACCATGCTGCTTCT |
| | | | | CCAGTGGCCGCCAACCTGTGTGA |
| | | | | TCCTGCCAGACATGCCCAGCACA |
| | | | | CCAGGATTCCTTGTGGCGCTGGA |
| | | | | CAAGTGCGCGCTGGAAGAGGAC |
| | | | | CTGAAGCAGGCGGAGGTGTTCTG |
| | | | | CAACCTCAAAGACCCGCTCCTGA |
| | | | | GAAGCCTGGCTGCCCTTGCAGAA |
| | | | | GAGGACAGCCTAGACTGCACACC |
| | | | | GTGAAAATGTGGCGAGCC |
| AS13 | GRIN3A | 265 | 472 | AAGAGAAGCTTTGCCGTGACCGA |
| | | | | GCGGATCATC |
| AS47 | AGRN | 317 | 473 | TTCAAGAAGTTCGACGGCCCTTG |
| | | | | CGGAGAAAGAGGCGGAGGCAGA |
| | | | | ACAGCTAGAGCCCTTTGGGCTAG |
| | | | | AGGCGACAGCGTTCTGACACCAG |
| | | | | CTCTGGACCCTCAGACACCTGTT |
| | | | | AGGGCCCCTAGCCTGACAAGAGC |
| | | | | TGCCGCCGCTGTG |
| AS8 | CACNA1D | 255 | 474 | CTGGTGCTGGGAGTGCTGTCTGG |
| | | | | ACACTCTGGCAGCAGACTG |
| AS19 | NWD1 | 277 | 475 | CAGTGGCAGCACTATCACAGATC |
| | | | | TGGCGAAGCCGCCGGAACACCCC |
| | | | | TTTGGAGGCCAACAAGAAAC |
| AS37 | RECQL4 | 297 | 476 | TGCCACTTGTTTCTGCAGCCCCA |
| | | | | AGTGGGCACACCTCCTCCACATA |
| | | | | CAGCCTCTGCTAGAGCACCTAGC |
| | | | | GGCCCTCCACATCCTCACGAATC |
| | | | | TTGTCCTGCCGGAAGAAGGCCTG |
| | | | | CCAGAGCCGCTCAAACATGTGCC |
| | | | | AGACGACAGCACGGACTGCCTG |
| | | | | GATGTGAAGAGGCTGGAACAGC |
| | | | | CAGAGTGCCTAGCCTGCACCTCC |
| | | | | ATCTGCATCAGGCTGCTCTTGGA |
| | | | | GCCGGAAGAGGTAGAGGATGGG |
| | | | | GCGAAGCTTGTGCTCAGGTGCCA |
| | | | | CCTTCTAGAGGC |
| AS23 | ZNF614 | 285 | 477 | AAGATCCAGAACAAGAACTGCC |
| | | | | CCGAC |
| MS1 | TTLL7 | 437 | 478 | CACTACAAGCTGATCCAGCAGCC |
| | | | | AATCAGCCTGTTCAGCATCACCG |
| | | | | ACCGGCTGCACAAGACATTCAGC |
| | | | | CAGCTGCCAAGCGTGCACCTGTG |
| | | | | CTCCATCACCTTCCAGTGGGGAC |
| | | | | ACCCTCCTATCTTTTGCTCCACCA |
| | | | | ACGACATCTGCGTGACCGCCAAC |
| | | | | TTCTGTATCAGCGTGACCTTCCTG |
| | | | | AAGCCTTGCTTTCTGCTGCACGA |
| | | | | GGCCAGCGCCTCTCAG |
| MS3 | TESK1 | 439 | 479 | CGAACCGCTCTGACACACAACCA |
| | | | | GGACTTCAGCATCTACAGACTGT |
| | | | | GTTGCAAGCGGGGCTCCCTGTGC |
| | | | | CATGCAAGCCAAGCTAGAAGCCC |
| | | | | CGCCTTTCCTAAACCTGTGCGAC |
| | | | | CTCTGCCAGCTCCAATCACCAGA |
| | | | | ATTACCCCTCAGCTCGGCGGCCA |
| | | | | GAGCGATTCATCTCAACCTCTGC |
| | | | | TGACCACCGGCAGACCTCAAGGC |
| | | | | TGGCAAGACCAAGCTCTGAGACA |
| | | | | CACCCAGCAGGCTAGCCCTGCCT |
| | | | | CTTGTGCCACCATCACAATCCCC |
| | | | | ATCCACTCTGCCGCTCTGGGCGA |
| | | | | TCATTCTGGCGATCCTGGACCAG |
| | | | | CCTGGGACACATGTCCTCCACTG |
| | | | | CCACTCACAACACTGATCCCTAG |
| | | | | GGCTCCTCCACCTTACGGCGATT |
| | | | | CTACCGCTAGAAGCTGGCCCAGC |
| | | | | AGATGTGGACCACTCGGA |
| MS6 | SOAT1 | 442 | 480 | TACGCCTACAAGGACTTCCTGTG |
| | | | | GTGCTTCCCCTTCTCTCTGGTGTT |
| | | | | CCTGCAAGAGATCCAGATCTGCT |
| | | | | GTCATGTGTCCTGCCTGTGCTGC |
| | | | | ATCTGCTGTAGCACCAGAATCTG |
| | | | | CCTGGGCTGTCTGCTGGAACTGT |
| | | | | TCCTGAGCAGAGCCCTGAGAGCA |
| | | | | CTGCACGTGCTGTGGAACGGATT |
| | | | | CCAGCTGCACTGCCAG |
| MS8 | ZYG11A | 444 | 481 | ACAATGCCCGCCATCCTGAAGCT |
| | | | | GCAGAAGAATTGCCTCCTAAGCC |
| | | | | TG |
| P82 | AR-V7 | 379 | 482 | TACGAAGCCGGGATGACCCTGGG |
| | | | | CGAGAAGTTCAGAGTGGGCAACT |
| | | | | GCAAGCACCTGAAGATGACCCG |
| | | | | GCCT |
| P16 | MSMB- | 343 | 483 | GGCGTGCCAGGCGATAGCACTCG |
| | NCOA4- | | | GAGAGCCGTCAGACGGATGAAC |
| | 1 | | | ACCTTT |
| FUS1 | SLC45A3 -> | 211 | 484 | TGTGGCGCCTCTGCCTGTGACGT |
| | ELK4-1 | | | GTCCCTGATCGCTATGGACTCCG |
| | | | | CC |
| P22 | SLC45A3- | 349 | 485 | AGCCTGTACCACCGGGAAAAGC |
| | ELK4-2 | | | AGCTCATTGCCATGGACAGCGCC |
| | | | | ATC |
| FUS2 | ARHGEF38 -> | 213 | 486 | ACCGAGTACAACCAGAAACTGC |
| | ARHGEF38- | | | AAGTGAACCAGTTCAGCGAGAG |
| | IT1 | | | CAAG |
| FUS3 | MSMB -> | 215 | 487 | ACCGAGATCAGCTGCTGCACCCT |
| | NCOA4-2 | | | GAGCAGCGAGGAAAACGAGTAC |
| | | | | CTGCCTAGACCTGAGTGGCAGCT |
| | | | | GCAG |
| FUS6 | TMPRSS2 -> | 221 | 488 | TGCGAAGAGAGAGGCGCCGCAG |
| | ERG | | | GATCTCTGATCTCCTGCGAA |
| FUS5 | TMPRSS2 -> | 219 | 489 | AACAGCAAGATGGCCCTGAATA |
| | ERG | | | GCGAGGCCCTGTCTGTGGTGTCT |
| | | | | GAA |
| FUS8 | INCA1 -> | 225 | 490 | TGGGGCATGGAACTGGCCGCCAG |
| | CAMTA2 | | | CAGAAGATTCAGCTGGGATCATC |
| | | | | ATAGCGCAGGCGGCCCACCTAGA |
| | | | | GTGCCATCTGTTAGAAGCGGAGC |
| | | | | TGCCCAGGTGCAGCCTAAAGATC |
| | | | | CTCTGCCACTGAGAACACTGGCC |
| | | | | GGCTGCCTTGCTAGAACAGCCCA |
| | | | | TCTTAGACCTGGCGCCGAGTCTC |
| | | | | TGCCTCAGCCACAACTGCACTGT |
| | | | | ACC |
| FUS15 | D2HGDH -> | 345 | 491 | CATGTCGTCGGCTACGGCCACCT |
| | GAL3ST2 | | | GGATACAAGCGGAAGCAGCTCT |
| | | | | AGCTCCAGCTGGCCT |
| P35 | TMPRSS2- | 353 | 492 | AACTCAAAAATGGCTCTGAACAG |
| | ERG | | | CCTGAACTCCATCGACGACGCCC |
| | | | | AGCTGACAAGAATCGCCCCTCCT |
| | | | | AGATCTCACTGCTGCTTTTGGGA |
| | | | | AGTGAACGCCCCA |
| FUS19 | GTF2F1 -> | 235 | 493 | AAGATGCACTTTAGCCTGAAAGA |
| | PSPN | | | ACACCCTCCACCACCTTGTCCTC |
| | | | | CA |
| FUS7 | NME4 -> | 223 | 494 | CTGTGGTTCCAGTCCAGCGAGCT |
| | DECR2 | | | GTCTCCTACTGGTGCCCCTTGGC |
| | | | | CATCTAGACGCCCTACTTGGAGA |
| | | | | GGCACCACCGTGTCACCAAGAAC |
| | | | | CGCCACAAGCAGCGCCAGAACCT |
| | | | | GTTGTGGCACAAAGTGGCCCTCC |
| | | | | AGCCAAGAAGCCGCTCTCGGACT |
| | | | | TGGAAGCGGACTGCTGAGGTTCT |
| | | | | CTTGTGGAACCGCCGCCATTCGG |
| M84 | AR- | 167 | 495 | ATCGCTAGAGAGCTGCACCAGTT |
| | T878A | | | CGCCTTCGACCTGCTGATCAAGA |
| | | | | GCCAC |
| M86 | AR- | 171 | 496 | CAGCCTGATTCTTTTGCCGCACT |
| | L702H | | | GCACAGCTCCCTGAACGAGCTGG |
| | | | | GAGAG |
| M10 | SPOP- | 19 | 497 | TTCGTGCAAGGCAAGGATTGGGG |
| | F133L | | | CCTCAAAAAGTTTATCCGCAGAG |
| | | | | ACTTC |
| M12 | SPOP- | 23 | 498 | TTTGTGCAGGGCAAAGACTGGGG |
| | W133V | | | CGTGAAGAAGTTCATCCGGCGGG |
| | | | | ACTTC |
| FR1 | ZFHX3 | 177 | 499 | CAGAACCTGCAGAACGGCGGAG |
| | | | | GCTCTAGAAGCTCTGCTACACTT |
| | | | | CCTGGCAGGCGGCGGAGAAGAT |
| | | | | GGCTGAGAAGAAGGCGGCAGCC |
| | | | | TATCTCTGTGGCTCCTGCTGGAC |
| | | | | CTCCTAGACGGCCCAACCAGAAG |
| | | | | CCTAATCCTCCTGGCGGAGCCAG |
| | | | | ATGCGTGATCATGAGGCCTACAT |
| | | | | GGCCTGGCACCAGCGCCTTCACC |

TABLE 24

| | | | Codon- | |
|---|---|---|---|---|
| | | | optimized | |
| | | Amino | polynucleotide | Codon-optimized |
| | | acid | for MVA | polynucleotide |
| Neoantigen | | SEQ | expression; | sequence for |
| ID | Gene ID | ID NO: | SEQ ID NO: | MVA expression |
| AS18 | NWD1 | 275 | 500 | TGGAAGTTCGAGATGAGCT |
| | | | | ACACCGTTGGCGGCCCTCC |
| | | | | ACCACATGTTCACGCCAGA |
| | | | | CCTAGACACTGGAAAACCG |
| | | | | ACAGA |
| P87 | AR-Intron | 381 | 501 | TACGAGGCCGGCATGACAC |
| | | | | TCGGAGGCAAGATCCTGTT |
| | | | | CTTCCTGTTCCTGCTGCTCC |
| | | | | CTCTGAGCCCCTTCAGCCT |
| | | | | GATCTTT |
| AS55 | SPOC | 333 | 461 | GATGGCCACAGCTACACCA |
| | | | | GCAAAGTGAACTGCCTCCT |
| | | | | GCTGCAGGATGGCTTCCAC |
| | | | | GGCTGTGTGTCTATTACTG |
| | | | | GCGCCGCTGGCAGACGGAA |
| | | | | CCTGAGCATCTTTCTGTTTC |
| | | | | TGATGCTGTGCAAGCTCGA |
| | | | | GTTCCACGCCTGC |
| AS57 | KLK3 | 337 | 503 | ACAGGCGGCAAGAGCACAT |
| | | | | GTTCTGCCCCTGGACCTCA |
| | | | | GTCTCTGCCCAGCACACCC |
| | | | | TTCAGCACATACCCTCAGT |
| | | | | GGGTCATCCTGATCACCGA |
| | | | | GCTG |
| AS15 | LRRC45 | 269 | 504 | GTGCTGCGGTTCCTGGATC |
| | | | | TCAAAGTGCGCTACCTGCA |
| | | | | CAGC |
| AS7 | ACSM1 | 253 | 505 | GATTATTGGGCCCAGAAAG |
| | | | | AAAAGGGCAGCAGCAGCTT |
| | | | | CCTGCGGCCTAGCTGT |
| AS43 | CPNE7 | 309 | 506 | GTGCCCTTCCGGGAACTGA |
| | | | | AGAACGTGTCCGTTCTGGA |
| | | | | AGGCCTGAGGCAGGGCAG |
| | | | | ACTTGGCGGACCTTGTAGC |
| | | | | TGCCACTGTCCTAGACCAA |
| | | | | GCCAGGCCAGACTGACCCC |
| | | | | TGTGGATGTGGCTGGCCCA |
| | | | | TTTCTGTGTCTGGGCGACCC |
| | | | | TGGACTGTTCCCTCCAGTG |
| | | | | AAGTCTAGCATC |
| AS51 | CPNE7 | 325 | 507 | GGCATGGAATGTACACTGG |
| | | | | GCCAAGTGGGAGCCCCATC |
| | | | | TCCTAGAAGAGAAGAGGAT |
| | | | | GGCTGGCGCGGAGGCCACT |
| | | | | CTAGATTCAAAGCTGATGT |
| | | | | GCCCGCTCCTCAGGGCCCT |
| | | | | TGTTGGGGAGGACAACCTG |
| | | | | GATCTGCCCCATCTTCTGCC |
| | | | | CCACCTGAACAGAGCCTGC |
| | | | | TGGAT |
| AS16 | LRRC45 | 271 | 508 | GGCAACACCACACTGCAAC |
| | | | | AGCTGGGAGAAGCCTCTCA |
| | | | | GGCCCCAAGCGGTTCTCTG |
| | | | | ATCCCTCTCAGACTGCCCCT |
| | | | | CCTGTGGGAAGTGCGGGGC |
| AS41 | RHPN1 | 305 | 509 | GAGGCTTTCCAGAGAGCAG |
| | | | | CTGGCGAAGGCGGACCTGG |
| | | | | CAGAGGTGGTGCTAGAAGA |
| | | | | GGTGCTAGAGTGCTGCAGA |
| | | | | GCCCATTCTGTAGAGCTGG |
| | | | | CGCTGGCGAATGGCTGGGC |
| | | | | CACCAATCTCTTAGA |
| AS6 | ACSM1 | 251 | 510 | GACTATTGGGCTCAAAAAG |
| | | | | AGAAGATCAGCATCCCCAG |
| | | | | AACACACCTGTGC |
| AS3 | DNAH8 | 245 | 511 | GTGGCCATGATGGTGCCCG |
| | | | | ACAGACAGGTGCACTACGA |
| | | | | CTTCGGCCTG |
| AS11 | CPNE7 | 261 | 512 | GTGCCCTTCAGAGAGCTGA |
| | | | | AAAACCAGAGAACAGCCC |
| | | | | AGGGCGCTCCTGGAATCCA |
| | | | | TCATGCTGCTTCTCCAGTGG |
| | | | | CCGCCAATCTGTGCGATCC |
| | | | | TGCCAGACATGCCCAGCAT |
| | | | | ACCAGGATTCCTTGTGGCG |
| | | | | CTGGACAAGTGCGCGCTGG |
| | | | | AAGAGGACCTGAAGCTGGT |
| | | | | GGCGGAGTTCTGCAGCCTC |
| | | | | AAAGACCTGCTCCTGAGAA |
| | | | | GCCTGGCTGCCCCTGTAGA |
| | | | | AGAGGACAGCCTAGACTGC |
| | | | | ACACCGTGAAGATGTGGCG |
| | | | | GGCC |
| AS13 | GRIN3A | 265 | 513 | AAGAGAAGCTTCGCCGTGA |
| | | | | CCGAGCGGATCATC |
| AS47 | AGRN | 317 | 514 | TTTAAGAAGTTTGACGGCC |
| | | | | CCTGCGGCGAGAGAGGCGG |
| | | | | AGGAAGAACTGCAAGAGC |
| | | | | CCTTTGGGCCAGAGGCGAC |
| | | | | TCTGTTCTGACACCAGCTCT |
| | | | | GGACCCTCAGACACCTGTT |
| | | | | AGGGCCCCTAGCCTGACAA |
| | | | | GAGCTGCCGCTGCTGTT |
| AS8 | CACNA1D | 255 | 515 | CTGGTGCTGGGCGTGCTGT |
| | | | | CTGGCCACTCTGGAAGCAG |
| | | | | ACTG |
| AS19 | NWD1 | 277 | 516 | CAATGGCAGCACTACCACA |
| | | | | GATCTGGCGAAGCCGCTGG |
| | | | | AACCCCACTTTGGAGGCCT |
| | | | | ACCAGAAAC |
| AS37 | RECQL4 | 297 | 517 | TGCCACTTGTTTCTCCAGCC |
| | | | | ACAAGTGGGCACCCCTCCA |
| | | | | CCTCATACAGCCTCTGCTA |
| | | | | GAGCACCTAGCGGCCCACC |
| | | | | TCATCCTCACGAATCTTGTC |
| | | | | CTGCCGGAAGAAGGCCTGC |
| | | | | CAGAGCCGCTCAAACATGT |
| | | | | GCCAGACGACAGCACGGAC |
| | | | | TGCCCGGATGTGAAGAAGC |
| | | | | CGGAACAGCCAGAGTGCCT |
| | | | | AGCCTGCACCTTCATCTGC |
| | | | | ATCAGGCCGCTCTTGGAGC |
| | | | | CGGAAGAGGTAGAGGATG |
| | | | | GGGAGAAGCTTGTGCCCAG |
| | | | | GTGCCACCTTCTAGAGGC |
| AS23 | ZNF614 | 285 | 477 | AAGATCCAGAACAAGAACT |
| | | | | GCCCCGAC |
| MS1 | TTLL7 | 437 | 519 | CACTACAAGCTGATCCAGC |
| | | | | AGCCAATCAGCCTGTTCTC |
| | | | | CATCACCGACCGGCTGCAC |
| | | | | AAGACATTCAGCCAGCTGC |
| | | | | CTTCCGTGCATCTGTGCAG |
| | | | | CATCACCTTCCAGTGGGGA |
| | | | | CACCCTCCTATCTTTTGCTC |
| | | | | CACCAACGACATCTGCGTG |
| | | | | ACCGCCAACTTCTGTATCA |
| | | | | GCGTGACCTTCCTGAAGCC |
| | | | | TTGCTTTCTGCTGCACGAG |
| | | | | GCCTCCGCCAGCCAG |
| MS3 | TESK1 | 439 | 520 | CGGACCGCTCTGACCCACA |
| | | | | ACCAGGACTTCAGCATCTA |
| | | | | CCGGCTGTGCTGCAAGAGG |
| | | | | GGCTCTCTGTGTCATGCTA |
| | | | | GCCAGGCTAGAAGCCCCGC |
| | | | | CTTTCCTAAGCCTGTCAGA |
| | | | | CCTCTGCCTGCTCCTATCAC |
| | | | | CAGAATCACCCCTCAGCTC |
| | | | | GGCGGCCAGTCTGATTCAT |
| | | | | CTCAGCCACTGCTGACCAC |
| | | | | CGGCAGACCTCAAGGATGG |
| | | | | CAAGACCAGGCTCTGAGAC |
| | | | | ACACACAGCAGGCTAGCCC |
| | | | | AGCCTCTTGCGCCACCATC |
| | | | | ACAATACCAATACATTCTG |
| | | | | CCGCTCTGGGCGATCACAG |
| | | | | CGGAGATCCTGGACCTGCC |
| | | | | TGGGATACTTGTCCTCCTCT |
| | | | | GCCCCTAACTACACTGATC |
| | | | | CCTAGGGCTCCTCCACCTT |
| | | | | ACGGCGATAGCACAGCCAG |
| | | | | ATCCTGGCCTAGCAGATGT |
| | | | | GGCCCTCTGGGC |
| MS6 | SOAT1 | 442 | 521 | TACGCCTACAAGGACTTCC |
| | | | | TGTGGTGCTTCCCCTTCTCT |
| | | | | CTGGTGTTCCTGCAAGAAA |
| | | | | TCCAGATCTGCTGTCACGT |
| | | | | GTCCTGCCTGTGCTGTATCT |
| | | | | GCTGTAGCACCCGGATCTG |
| | | | | TCTGGGCTGTCTGCTGGAA |
| | | | | CTGTTCCTGAGCAGAGCCC |
| | | | | TGAGAGCACTGCACGTGCT |
| | | | | GTGGAACGGATTCCAGCTG |
| | | | | CACTGCCAG |
| MS8 | ZYG11A | 444 | 522 | ACCATGCCTGCCATTCTGA |
| | | | | AGCTGCAGAAGAATTGTCT |
| | | | | TCTAAGCCTG |
| P82 | AR-V7 | 379 | 523 | TATGAGGCTGGAATGACCC |
| | | | | TGGGCGAGAAGTTCAGAGT |
| | | | | GGGCAACTGCAAGCACCTG |
| | | | | AAGATGACCCGGCCT |
| P16 | MSMB- | 343 | 524 | GGAGTGCCTGGCGATTCTA |
| | NCOA4-1 | | | CTAGAAGGGCCGTGCGGCG |
| | | | | GATGAACACCTTT |
| FUS1 | SLC45A3 -> | 211 | 525 | TGTGGCGCATCTGCCTGCG |
| | ELK4- | | | ACGTGTCCCTGATCGCTAT |
| | 1 | | | GGATAGCGCC |
| P22 | SLC45A3- | 349 | 485 | AGCCTGTACCACCGGGAAA |
| | ELK4- | | | AGCAGCTCATTGCCATGGA |
| | 2 | | | CAGCGCCATC |
| FUS2 | ARHGEF38 -> | 213 | 486 | ACCGAGTACAACCAGAAAC |
| | ARHGEF38- | | | TGCAAGTGAACCAGTTCAG |
| | IT1 | | | CGAGAGCAAG |
| FUS3 | MSMB -> | 215 | 528 | ACCGAGATCAGCTGCTGCA |
| | NCOA4-2 | | | CCCTGAGCAGCGAGGAAAA |
| | | | | CGAGTACCTGCCTAGACCT |
| | | | | GAATGGCAGCTGCAG |
| FUS6 | TMPRSS2 -> | 221 | 529 | TGCGAGGAAAGAGGCGCA |
| | ERG | | | GCCGGATCTCTGATCTCTTG |
| | | | | CGAG |
| FUS5 | TMPRSS2 -> | 219 | 530 | AACAGCAAGATGGCCCTGA |
| | ERG | | | ATAGCGAGGCCCTGTCTGT |
| | | | | GGTGTCCGAG |
| FUS8 | INCA1 -> | 225 | 531 | TGGGGAATGGAACTGGCCG |
| | CAMTA2 | | | CTAGCAGGCGGTTTAGCTG |
| | | | | GGATCATCATTCTGCCGGC |
| | | | | GGACCTCCAAGAGTGCCAA |
| | | | | GCGTTAGAAGCGGAGCAGC |
| | | | | CCAGGTCCAGCCTAAAGAT |
| | | | | CCACTGCCACTGAGAACAC |
| | | | | TGGCCGGCTGCCTTGCCAG |
| | | | | AACAGCTCATCTTAGACCT |
| | | | | GGCGCCGAAAGCCTGCCTC |
| | | | | AACCTCAGCTGCATTGCAC |
| | | | | A |
| FUS15 | D2HGDH -> | 345 | 532 | CACGTTGTCGGCTATGGCC |
| | GAL3ST2 | | | ACCTGGATACAAGCGGCTC |
| | | | | CTCTAGCAGTAGCTCCTGG |
| | | | | CCT |
| P35 | TMPRSS2- | 353 | 533 | AATTCTAAGATGGCTCTCA |
| | ERG | | | ACAGCCTGAACTCCATCGA |
| | | | | CGACGCCCAGCTGACAAGA |
| | | | | ATCGCCCCTCCAAGAAGCC |
| | | | | ACTGTTGCTTTTGGGAAGT |
| | | | | GAACGCCCCT |
| FUS19 | GTF2F1 -> | 235 | 534 | AAGATGCACTTCTCACTGA |
| | PSPN | | | AAGAGCACCCGCCACCGCC |
| | | | | GTGCCCACCG |
| FUS7 | NME4 -> | 223 | 535 | CTGTGGTTCCAGTCCAGCG |
| | DECR2 | | | AACTGTCTCCTACTGGCGC |
| | | | | TCCATGGCCAAGCAGAAGG |
| | | | | CCTACTTGGAGAGGCACCA |
| | | | | CCGTGTCTCCAAGAACCGC |
| | | | | TACAAGCAGCGCCAGAACC |
| | | | | TGTTGCGGCACAAAATGGC |
| | | | | CCTCCAGCCAAGAAGCTGC |
| | | | | CCTCGGACTTGGAAGCGGA |
| | | | | CTGCTGAGATTCAGCTGTG |
| | | | | GCACAGCCGCCATCAGA |
| M84 | AR- | 167 | 536 | ATCGCCAGAGAACTGCACC |
| | T878A | | | AGTTCGCCTTCGACCTGCT |
| | | | | GATCAAGAGCCAC |
| M86 | AR- | 171 | 537 | CAGCCTGACAGCTTTGCTG |
| | L702H | | | CCCTGCATAGCTCCCTGAA |
| | | | | TGAGCTGGGCGAA |
| M10 | SPOP- | 19 | 538 | TTTGTGCAGGGTAAAGATT |
| | F133L | | | GGGGCCTCAAAAAGTTTAT |
| | | | | CAGACGGGACTTC |
| M12 | SPOP- | 23 | 539 | TTCGTGCAGGGCAAAGACT |
| | W133V | | | GGGGCGTGAAGAAGTTCAT |
| | | | | CCGGCGGGACTTT |
| FR1 | ZFHX3 | 177 | 540 | CAGAACCTGCAGAACGGCG |
| | | | | GAGGCTCTAGAAGCTCTGC |
| | | | | TACACTTCCTGGCAGGCGG |
| | | | | CGGAGAAGATGGCTGAGA |
| | | | | AGAAGGCGGCAGCCTATCT |
| | | | | CTGTGGCTCCTGCTGGACC |
| | | | | TCCTAGACGGCCCAACCAG |
| | | | | AAGCCTAATCCTCCTGGCG |
| | | | | GAGCCAGATGCGTGATCAT |
| | | | | GAGGCCTACATGGCCTGGC |
| | | | | ACCAGCGCCTTTACC |

### Synthetic Gene Design

[0926] The 41 neoantigen amino acidic sequences were joined head to tail. The order of the neoantigens sequences was determined according to a strategy that minimized the formation of predicted junctional epitopes that may be generated by the juxtaposition of two adjacent neoantigen peptides.

[0927] To this purpose, custom tools were developed to split the 41 neoantigens into 4 smaller lists (sublists) of similar cumulative length and to generate, for each sublist, 2 million scrambled layouts of the synthetic gene with a different neoantigen order. The tool proceeded iteratively. At each loop a scrambled layout was generated and compared to the layouts already generated. If the number of predicted junctional epitopes in the new layout was lower than the number of the previously best layout, the new layout was considered as the best. Each scrambled layout was analyzed estimating the number of potential junctional epitopes predicted to bind one out of a subset of 9 class I HLA haplotypes with an IC₅₀<=1500 nM (considering only 9 mer epitopes predicted by the IEDB_recommended method included in the IEDB 2.17 software). The 9 class I HLA haplotypes cumulatively cover 82% of the world population as estimated by analyzing haplotypes annotated for subjects in the 1000 genomes project. Scrambled layouts with neoantigens that formed predicted junctional epitopes with the N-terminal T-cell enhancer or the C-terminal TAG sequence were excluded. As an additional constraint, in each layout junctions that contained a 9 mer peptide that matched a protein annotated in the human wildtype proteome were also excluded.

[0928] The best layouts obtained after scrambling 2 million times each of the 4 sublists were then joined to generate an overall layout comprising all 41 neoantigens. Out of all possible combinations of the best 4 layouts the one with the minimal number of predicted epitopes formed by the newly formed junctions was selected.

[0929] The whole procedure described was applied two times independently to generate two artificial genes to be encoded alternatively by the GAd20 or MVA vector. For the MVA vector the scrambled layouts were designed with the additional constraint of avoiding the junctions with predicted junctional epitopes that were already present in the layout selected for the Adenoviral transgene.

[0930] Amino acid sequences of the optimized layout for the GAd20 is shown in SEQ ID NO: 541 and for MVA SEQ ID NO: 543. Neoantigens in the GAd20 insert of SEQ ID NO: 541 were in the following order: FR1-AS13-AS7-AS6-AS8-P87-FUS3-AS43-AS57-AS51-AS18-AS55-AS23-AS47-MS1-AS37-AS15-AS19-AS11-AS3-P16-P82-FUS5-FUS1-M12-MS6-FUS2-P22-FUS6-MS8-MS3-AS16-M86-M84-M10-FUS8-FUS7-FUS19-AS41-FUS15-P35. Neoantigens in the MVA insert of SEQ DID NO: 543 were in the following order: FR1-AS51-AS6-AS18-AS7-AS43-FUS3-P87-AS8-AS13-AS57-AS55-AS19-AS3-AS23-AS15-AS11-AS37-MS1-AS47-P16-FUS1-FUS6-P22-M12-MS8-FUS5-P82-FUS2-MS3-MS6-AS16-P35-M10-AS41-FUS8-M84-FUS19-FUS15-M86-FUS7.

[0931] Five additional alternative optimized layouts of scrambled neoantigens were assessed for each vector. The five alternative layouts had the same number of predicted junctional epitopes compared to SEQ ID NO: 541 and SEQ ID NO: 543. The five alternative layouts for Gad20 are shown in SEQ ID NO: 554, SEQ ID NO; 555, SEQ ID NO: 556, SEQ ID NO: 623 and SEQ ID NO: 624. The five alternative layouts for MVA are shown in SEQ ID NO: 557, SEQ ID NO: 558, SEQ ID NO: 559, SEQ ID NO: 625 and SEQ ID NO: 626. The neoantigens in the alternative optimized layouts were in the following order:
[0932] SEQ ID NO: 554: FR1-AS13-AS8-P87-FUS3-AS43-AS57-AS51-AS7-AS6-AS18-P16-P82-FUS5-FUS1-M12-MS6-FUS2-P22-FUS6-MS8-MS3-AS55-AS23-AS47-MS1-AS37-AS15-AS19-AS11-AS3-AS16-M86-M84-M10-FUS8-FUS7-FUS19-AS41-FUS15-P35
[0933] SEQ ID NO: 555: FR1-AS13-FUS3-P87-AS7-AS43-AS57-AS51-AS6-AS8-AS18-AS55-AS23-AS47-MS1-AS37-AS15-AS19-AS11-AS3-P16-P82-FUS5-FUS1-M12-MS6-FUS2-P22-FUS6-MS8-MS3-AS16-M86-M84-M10-FUS8-FUS7-FUS19-AS41-FUS15-P35
[0934] SEQ ID NO: 556: FR1-AS13-AS7-AS43-AS8-P87-FUS3-AS57-AS51-AS6-AS18-AS55-AS23-AS47-MS1-AS37-AS15-AS19-AS11-AS3-P16-P82-FUS5-FUS1-M12-MS6-FUS2-P22-FUS6-MS8-MS3-AS16-M86-M84-M10-FUS8-FUS7-FUS19-AS41-FUS15-P35
[0935] SEQ ID NO: 623: P16-P82-FUS5-FUS1-M12-MS6-FUS2-P22-FUS6-MS8-MS3-AS16-M86-M84-M10-FUS8-FUS7-FUS19-AS41-FUS15-P35-AS55-AS23-AS47-MS1-AS37-AS15-AS19-AS11-AS3-FR1-AS13-AS8-P87-FUS3-AS43-AS57-AS51-AS7-AS6-AS18
[0936] SEQ ID NO: 624: AS16-M86-M84-M10-FUS8-FUS7-FUS19-AS41-FUS15-P35-P16-P82-FUS5-FUS1-M12-MS6-FUS2-P22-FUS6-MS8-MS3-AS55-AS23-AS47-MS1-AS37-AS15-AS19-AS11-AS3-FR1-AS13-FUS3-P87-AS7-AS43-AS57-AS51-AS6-AS8-AS18
[0937] SEQ ID NO: 557: FR1-AS51-AS6-AS18-AS7-AS43-FUS3-P87-AS8-AS13-AS57-AS55-AS37-MS1-AS3-AS23-AS15-AS11-AS19-AS47-P16-FUS1-FUS6-P22-M12-MS8-FUS5-P82-FUS2-MS3-MS6-AS16-P35-M10-AS41-FUS8-M84-FUS19-FUS15-M86-FUS7
[0938] SEQ ID NO: 558: AS55-AS19-AS3-AS15-AS23-AS11-A537-MS1-A547-FR1-AS51-A56-AS18-A57-A543-FUS3-P87-A58-AS13-A557-P16-FUS1-FUS6-P22-M12-MS8-FUS5-P82-FUS2-MS3-MS6-AS16-P35-M10-AS41-FUS8-M84-FUS19-FUS15-M86-FUS7
[0939] SEQ ID NO: 559: AS16-P35-M10-AS41-FUS8-M84-FUS19-FUS15-M86-FUS7-AS55-AS19-AS3-AS23-AS15-AS11-AS37-MS1-AS47-P16-FUS1-FUS2-P82-MS8-FUS5-FUS6-P22-M12-MS3-MS6-FR1-AS51-AS6-AS18-AS7-AS43-FUS3-P87-AS8-AS13-AS57
[0940] SEQ ID NO: 625: AS16-P35-M10-AS41-FUS8-M84-FUS19-FUS15-M86-FUS7-FR1-AS51-AS6-AS18-AS7-AS43-FUS3-P87-AS8-AS13-AS57-AS55-AS19-AS3-AS15-AS23-AS11-AS37-MS1-AS47-P16-FUS1-FUS6-P22-M12-MS8-FUS5-P82-FUS2-MS3-MS6
[0941] SEQ ID NO: 626: AS55-AS11-AS19-AS23-AS3-AS15-AS37-MS1-AS47-FR1-AS51-AS6-AS18-AS7-AS43-FUS3-P87-AS8-AS13-AS57-AS16-P35-M10-A541-FUS8-M84-FUS19-FUS15-M86-FUS7-P16-FUS1-FUS6-P22-M12-P82-MS8-FUS5-FUS2-MS3-MS6

### Insertion of T-Cell Enhancer and TAG Sequences

[0942] A small peptide fragment with length of 28aa from the mandarin fish invariant chain (MGQKEQIHTLQKNSERMSKQLTRSSQAV; SEQ ID NO: 549) was placed at the N-terminus of each transgene encoding the 41 neoantigens. Preclinical data has shown this sequence to increase the immunological response of the viral vector. A small segment of 7 amino acids (TAG sequence; seq: SHHHHHH; SEQ ID NO: 627) was added at the C-terminus of the transgene for the purpose of monitoring the expression of the encoded transgene.

[0943] Amino acid sequences of the optimized layout for the GAd20 that includes the TCE sequence and omits the tag sequence are shown in SEQ ID NO: 550 and for MVA SEQ ID NO: 551.

Conversion into nucleotide sequence and optimization to remove predicted miRNA binding sites.

[0944] The conversion from amino acid sequence into nucleotide sequence was performed using codon optimizing according to the human codon usage applying additional constraints to avoid as much as possible the following features:
[0945] internal TATA-boxes, chi-sites and ribosomal entry sites
[0946] AT-rich or GC-rich sequence stretches
[0947] RNA instability motifs
[0948] repeat sequences and RNA secondary structures
[0949] (cryptic) splice donor and acceptor sites in higher eukaryotes
[0950] TTTTTnT termination motifs for the MVA vector

[0951] EcoR1, BamH1 restriction sites and a KOZAK sequence were then added upstream the optimized nucleotide sequence. 2 STOP codons followed by Asc1 and Not1 restriction sites were added downstream the optimized nucleotide sequence.

[0952] The optimized nucleotide sequence of each transgene was then further analyzed with the PITA and miranda software to detect predicted miRNA target sites that might downregulate the expression of the synthetic transgene. 9 miRNA binding sites detected by both methods were removed by modifying the nucleotide sequence of the regions that are predicted to bind the miRNA “seed” by introducing synonymous changes in the corresponding codons. The synthesis of GAd20 and MVA transgenes, was performed using standard methods.

[0953] The codon optimized polynucleotide sequence encoding the GAd20 neoantigen layout of SEQ ID NO: 541 is shown in SEQ ID NO: 542.

[0954] The codon optimized polynucleotide sequence encoding the MVA (neoMVA) neoantigen layout of SEQ ID NO: 543 is shown in SEQ ID NO: 544.

[0955] The codon optimized polynucleotide sequence encoding the GAd20 neoantigen layout including the TCE sequence and excluding the TAG sequence of SEQ ID NO: 550 is shown in SEQ ID NO: 551.

[0956] The codon optimized polynucleotide sequence encoding the MVA neoantigen layout including the TCE sequence and excluding the TAG sequence of SEQ ID NO: 552 is shown in SEQ ID NO: 553.

[0957] Kozak sequence: CGCGACTTCGCCGCC; SEQ ID NO: 545

[0958] Polynucleotide encoding the TCE:

SEQ ID NO: 546
ATGGGCCAGAAAGAGCAGATCCACACACTGCAGAAAAACAGCGAGCGGAT
GAGCAAGCAGCTGACCAGATCTTCTCAGGCCGTG;

[0959] Polynucleotide encoding the serine-histidine tag:

SEQ ID NO: 547
AGCCATCACCATCACCACCAT;

[0960] Two stop codons (TAGTAA)

[0961] Polypeptide sequence of the TCE:

SEQ ID NO: 549
MGQKEQIHTLQKNSERMSKQLTRSSQAV;

### GAd20 Viral Vector Production

[0962] The GAd20 transgene was subcloned into a shuttle plasmid between CMV promoter with two TetO repeats and a BGH polyA via ECOR1-NOT1 restriction sites.

[0963] The resulting expression cassette was transferred into the GAd20 genome by homologous recombination in suitable E. coli strains, transformed with the CMV-transgene-BGH DNA fragment and with a construct carrying the GAd20 genome.

[0964] Recombination involved CMV and BGH as homology arms, that were already present in the GAd20 construct in place of the E1 deletion (insertion site of the transgene). Recombinant GAd20 vectors were then rescued by transfection of the E1 complementing, TetR expressing M9 cells and amplified by subsequent re-infection of fresh M9 cells.

CMV promoter with TetO sites:
SEQ ID NO: 628
Ccattgcatacgttgtatccatatcataatatgtacatttatattggctc
atgtccaacattaccgccatgttgacattgattattgactagttattaat
agtaatcaattacggggtcattagttcatagcccatatatggagttccgc
gttacataacttacggtaaatggcccgcctggctgaccgcccaacgaccc
ccgcccattgacgtcaataatgacgtatgttcccatagtaacgccaatag
ggactttccattgacgtcaatgggtggagtatttacggtaaactgcccac
ttggcagtacatcaagtgtatcatatgccaagtacgccccctattgacgt
caatgacggtaaatggcccgcctggcattatgcccagtacatgaccttat
gggactttcctacttggcagtacatctacgtattagtcatcgctattacc
atggtgatgcggttttggcagtacatcaatgggcgtggatagcggtttga
ctcacggggatttccaagtctccaccccattgacgtcaatgggagtttgt
tttggcaccaaaatcaacgggactttccaaaatgtcgtaacaactccgcc
ccattgacgcaaatgggcggtaggcgtgtacggtgggaggtctatataag
cagagctctccctatcagtgatagagatctccctatcagtgatagagatc
gtcgacgagctcgtttagtgaaccgtcagatcgcctggagacgccatcca
cgctgttttgacctccatagaagacaccgggaccgatccagcctccgcgg
ccgggaacggtgcattggaacgcggattccccgtgccaagagtga
BGH polyA
SEQ ID NO: 629
ctgtgccttctagttgccagccatctgagtagcccctcccccgtgccttc
cttgaccctggaaggtgccactcccactgtcctacctaataaaatgagga
aattgcatcgcattgtctgagtaggtgtcattctattctggggggtgggg
tggggcaggacagcaagggggaggattgggaagacaatagcaggcatgct
ggggatgcggtgggctctatggcc

### MVA Viral Vector Production

[0965] The MVA transgene was subcloned into the p94 shuttle plasmid via BAMH1-ASC1 restriction sites, under the control of the vaccinia P7.5 early/late promoter (SEQ ID NO: 630), between sequences homologous to the deletion III locus of MVA (FlankIII-1 and -2 regions). An additional expression cassette for eGFP protein, flanked by a repeated sequence named “Z”, was present in the p94 shuttle plasmid, between Flank III regions.

[0966] The parental MVA vector used for recombinant vaccine viruses' generation carried the HcRed1-1 fluorescent protein transgene at the Deletion III locus and was indicated as MVA-RED 476 MG.

[0967] Recombinant MVA, with transgene insertion at the Deletion III locus, were generated by two events of in vivo recombination in Chicken embryo fibroblasts (CEF) cells. The first recombination event occurred in cells infected with MVA-RED 476 MG and transfected with the p94 shuttle plasmid, and resulted in replacement of the HcRed protein gene with the transgene/eGFP cassette. Infected cells containing MVA-Green intermediate were isolated by FACS sorting of green cells. The intermediate recombinant MVA resulting from first recombination carried both the transgene and the eGFP cassette but was unstable due to the presence of repeated Z regions. Thus, a spontaneous second recombination event occurred involving Z regions and removed the eGFP cassette. The resulting recombinant MVA was colorless and carried the transgene cassette at the Deletion III locus (insertion site) of MVA-RED 476 MG. This was isolated by FACS sorting of colorless infected cells and amplified by re-infection of fresh CEF cells. The obtained lysate was used to infect Age1 cells to produce the research batch.

P7.5 early/late promoter
SEQ ID NO: 630
GATCACTAATTCCAAACCCACCCGCTTTTTATAGTAAGTTTTTCACCCATAAATAATAAATACAA
TAATTAATTTCTCGTAAAAGTAGAAAATATATTCTAATTTATTGCACGGTAAGGAAGTAGAATCA
TAAAGAACAGTGACGGATC
neoGAd20 protein (no TCE, no HIS tag)
SEQ ID NO: 541
QNLQNGGGSRSSATLPGRRRRRWLRRRRQPISVAPAGPPRRPNQKPNPPGGARCVIMRPTWPGTS
AFTKRSFAVTERIIDYWAQKEKGSSSFLRPSCDYWAQKEKISIPRTHLCLVLGVLSGHSGSRLYE
AGMTLGGKILFELFLLLPLSPFSLIFTEISCCTLSSEENEYLPRPEWQLQVPFRELKNVSVLEGL
RQGRLGGPCSCHCPRPSQARLTPVDVAGPFLCLGDPGLFPPVKSSITGGKSTCSAPGPQSLPSTP
FSTYPQWVILITELGMECTLGQVGAPSPRREEDGWRGGHSRFKADVPAPQGPCWGGQPGSAPSSA
PPEQSLLDWKFEMSYTVGGPPPHVHARPRHWKTDRDGHSYTSKVNCLLLQDGFHGCVSITGAAGR
RNLSIFLFLMLCKLEFHACKIQNKNCPDFKKFDGPCGERGGGRTARALWARGDSVLTPALDPQTP
VRAPSLTRAAAAVHYKLIQQPISLFSITDRLHKTFSQLPSVHLCSITFQWGHPPIFCSTNDICVT
ANFCISVTFLKPCFLLHEASASQCHLFLQPQVGTPPPHTASARAPSGPPHPHESCPAGRRPARAA
QTCARRQHGLPGCEEAGTARVPSLHLHLHQAALGAGRGRGWGEACAQVPPSRGVLRFLDLKVRYL
HSQWQHYHRSGEAAGTPLWRPTRNVPFRELKNQRTAQGAPGIHHAASPVAANLCDPARHAQHTRI
PCGAGQVRAGRGPEAGGGVLQPQRPAPEKPGCPCRRGQPRLHTVKMWRAVAMMVPDRQVHYDFGL
GVPGDSTRRAVRRMNTFYEAGMTLGEKFRVGNCKHLKMTRPNSKMALNSEALSVVSECGASACDV
SLIAMDSAFVQGKDWGVKKFIRRDFYAYKDFLWCFPFSLVFLQEIQICCHVSCLCCICCSTRICL
GCLLELFLSRALRALHVLWNGFQLHCQTEYNQKLQVNQFSESKSLYHREKQLIAMDSAICEERGA
AGSLISCETMPAILKLQKNCLLSLRTALTHNQDFSIYRLCCKRGSLCHASQARSPAFPKPVRPLP
APITRITPQLGGQSDSSQPLLTTGRPQGWQDQALRHTQQASPASCATITIPIHSAALGDHSGDPG
PAWDTCPPLPLTTLIPRAPPPYGDSTARSWPSRCGPLGGNTTLQQLGEASQAPSGSLIPLRLPLL
WEVRGQPDSFAALHSSLNELGEIARELHQFAFDLLIKSHFVQGKDWGLKKFIRRDFWGMELAASR
RFSWDHHSAGGPPRVPSVRSGAAQVQPKDPLPLRTLAGCLARTAHLRPGAESLPQPQLHCTLWFQ
SSELSPTGAPWPSRRPTWRGTTVSPRTATSSARTCCGTKWPSSQEAALGLGSGLLRFSCGTAAIR
KMHFSLKEHPPPPCPPEAFQRAAGEGGPGRGGARRGARVLQSPFCRAGAGEWLGHQSLRHVVGYG
HLDTSGSSSSSSWPNSKMALNSLNSIDDAQLTRIAPPRSHCCFWEVNAP
(with extended sequences of FUS1 and FUS29/P22 without
TCE and His-tag)
SEQ ID NO: 1004
QNLQNGGGSRSSATLPGRRRRRWLRRRRQPISVAPAGPPRRPNQKPNPPGGARCVIMRPTWPGTS
AFTKRSFAVTERIIDYWAQKEKGSSSFLRPSCDYWAQKEKISIPRTHLCLVLGVLSGHSGSRLYE
AGMTLGGKILFFLFLLLPLSPFSLIFTEISCCTLSSEENEYLPRPEWQLQVPFRELKNVSVLEGL
RQGRLGGPCSCHCPRPSQARLTPVDVAGPFLCLGDPGLFPPVKSSITGGKSTCSAPGPQSLPSTP
FSTYPQWVILITELGMECTLGQVGAPSPRREEDGWRGGHSRFKADVPAPQGPCWGGQPGSAPSSA
PPEQSLLDWKFEMSYTVGGPPPHVHARPRHWKTDRDGHSYTSKVNCLLLQDGFHGCVSITGAAGR
RNLSIFLFLMLCKLEFHACKIQNKNCPDFKKFDGPCGERGGGRTARALWARGDSVLTPALDPQTP
VRAPSLTRAAAAVHYKLIQQPISLFSITDRLHKTFSQLPSVHLCSITFQWGHPPIFCSTNDICVT
ANFCISVTFLKPCFLLHEASASQCHLFLQPQVGTPPPHTASARAPSGPPHPHESCPAGRRPARAA
QTCARRQHGLPGCEEAGTARVPSLHLHLHQAALGAGRGRGWGEACAQVPPSRGVLRFLDLKVRYL
HSQWQHYHRSGEAAGTPLWRPTRNVPFRELKNQRTAQGAPGIHHAASPVAANLCDPARHAQHTRI
PCGAGQVRAGRGPEAGGGVLQPQRPAPEKPGCPCRRGQPRLHTVKMWRAVAMMVPDRQVHYDFGL
GVPGDSTRRAVRRMNTFYEAGMTLGEKFRVGNCKHLKMTRPNSKMALNSEALSVVSEGASACDVS
LIAMDSAITLWFVQGKDWGVKKFIRRDFYAYKDFLWCFPFSLVFLQEIQICCHVSCLCCICCSTR
ICLGCLLELFLSRALRALHVLWNGFQLHCQTEYNQKLQVNQFSESKSLYHREKQLIAMDSAITLW
ICEERGAAGSLISCETMPAILKLQKNCLLSLRTALTHNQDFSIYRLCCKRGSLCHASQARSPAFP
KPVRPLPAPITRITPQLGGQSDSSQPLLTTGRPQGWQDQALRHTQQASPASCATITIPIHSAALG
DHSGDPGPAWDTCPPLPLTTLIPRAPPPYGDSTARSWPSRCGPLGGNTTLQQLGEASQAPSGSLI
PLRLPLLWEVRGQPDSFAALHSSLNELGEIARELHQFAFDLLIKSHFVQGKDWGLKKFIRRDFWG
MELAASRRFSWDHHSAGGPPRVPSVRSGAAQVQPKDPLPLRTLAGCLARTAHLRPGAESLPQPQL
HCTLWFQSSELSPTGAPWPSRRPTWRGTTVSPRTATSSARTCCGTKWPSSQEAALGLGSGLLRFS
CGTAAIRKMHFSLKEHPPPPCPPEAFQRAAGEGGPGRGGARRGARVLQSPFCRAGAGEWLGHQSL
RHVVGYGHLDTSGSSSSSSWPNSKMALNSLNSIDDAQLTRIAPPRSHCCFWEVNAP
neoGAd20 polynucleotide (no TCE, no HIS tag)
SEQ ID NO: 542
CAGAACCTGCAGAACGGCGGAGGCTCTAGAAGCTCTGCTACACTTCCTGGCAGGCGGCGGAGAAG
ATGGCTGAGAAGAAGGCGGCAGCCTATCTCTGTGGCTCCTGCTGGACCTCCTAGACGGCCCAACC
AGAAGCCTAATCCTCCTGGCGGAGCCAGATGCGTGATCATGAGGCCTACATGGCCTGGCACCAGC
GCCTTCACCAAGAGAAGCTTTGCCGTGACCGAGCGGATCATCGACTATTGGGCTCAAAAAGAGAA
GGGCAGCAGCAGCTTCCTGCGGCCTAGCTGTGATTATTGGGCCCAGAAAGAAAAGATCAGCATCC
CCAGAACACACCTGTGCCTGGTGCTGGGAGTGCTGTCTGGACACTCTGGCAGCAGACTGTATGAG
GCCGGCATGACACTCGGCGGCAAGATCCTGTTCTTCCTGTTCCTGCTGCTCCCTCTGAGCCCCTT
CAGCCTGATCTTCACCGAGATCAGCTGCTGCACCCTGAGCAGCGAGGAAAACGAGTACCTGCCTA
GACCTGAGTGGCAGCTGCAGGTCCCCTTCAGAGAGCTGAAGAACGTTTCCGTGCTGGAAGGCCTG
AGACAGGGCAGACTTGGCGGCCCTTGTAGCTGTCACTGCCCCAGACCTAGTCAGGCCAGACTGAC
ACCTGTGGATGTGGCCGGACCTTTCCTGTGTCTGGGAGATCCTGGCCTGTTTCCACCTGTGAAGT
CCAGCATCACAGGCGGCAAGTCCACATGTTCTGCCCCTGGACCTCAGAGCCTGCCTAGCACACCC
TTCAGCACATACCCTCAGTGGGTCATCCTGATCACCGAACTCGGCATGGAATGCACCCTGGGACA
AGTGGGAGCCCCATCTCCTAGAAGAGAAGAGGATGGCTGGCGCGGAGGCCACTCTAGATTCAAAG
CTGATGTGCCCGCTCCTCAGGGCCCTTGTTGGGGAGGACAACCTGGATCTGCCCCATCTTCTGCC
CCACCTGAACAGTCCCTGCTGGATTGGAAGTTCGAGATGAGCTACACCGTCGGCGGACCTCCACC
TCATGTTCATGCCAGACCTCGGCACTGGAAAACCGACAGAGATGGCCACAGCTACACCAGCAAAG
TGAACTGCCTCCTGCTGCAGGATGGCTTCCACGGCTGTGTGTCTATTACTGGCGCCGCTGGCAGA
CGGAACCTGAGCATCTTTCTGTTTCTGATGCTGTGCAAGCTCGAGTTCCACGCCTGCAAGATCCA
GAACAAGAACTGCCCCGACTTCAAGAAGTTCGACGGCCCTTGCGGAGAAAGAGGCGGAGGCAGAA
CAGCTAGAGCCCTTTGGGCTAGAGGCGACAGCGTTCTGACACCAGCTCTGGACCCTCAGACACCT
GTTAGGGCCCCTAGCCTGACAAGAGCTGCCGCCGCTGTGCACTACAAGCTGATCCAGCAGCCAAT
CAGCCTGTTCAGCATCACCGACCGGCTGCACAAGACATTCAGCCAGCTGCCAAGCGTGCACCTGT
GCTCCATCACCTTCCAGTGGGGACACCCTCCTATCTTTTGCTCCACCAACGACATCTGCGTGACC
GCCAACTTCTGTATCAGCGTGACCTTCCTGAAGCCTTGCTTTCTGCTGCACGAGGCCAGCGCCTC
TCAGTGCCACTTGTTTCTGCAGCCCCAAGTGGGCACACCTCCTCCACATACAGCCTCTGCTAGAG
CACCTAGCGGCCCTCCACATCCTCACGAATCTTGTCCTGCCGGAAGAAGGCCTGCCAGAGCCGCT
CAAACATGTGCCAGACGACAGCACGGACTGCCTGGATGTGAAGAGGCTGGAACAGCCAGAGTGCC
TAGCCTGCACCTCCATCTGCATCAGGCTGCTCTTGGAGCCGGAAGAGGTAGAGGATGGGGCGAAG
CTTGTGCTCAGGTGCCACCTTCTAGAGGCGTGCTGAGATTCCTGGACCTGAAAGTGCGCTACCTG
CACAGCCAGTGGCAGCACTATCACAGATCTGGCGAAGCCGCCGGAACACCCCTTTGGAGGCCAAC
AAGAAACGTGCCCTTCCGGGAACTGAAGAACCAGAGAACAGCTCAGGGCGCTCCTGGAATCCACC
ATGCTGCTTCTCCAGTGGCCGCCAACCTGTGTGATCCTGCCAGACATGCCCAGCACACCAGGATT
CCTTGTGGCGCTGGACAAGTGCGCGCTGGAAGAGGACCTGAAGCAGGCGGAGGTGTTCTGCAACC
TCAAAGACCCGCTCCTGAGAAGCCTGGCTGCCCTTGCAGAAGAGGACAGCCTAGACTGCACACCG
TGAAAATGTGGCGAGCCGTGGCCATGATGGTGCCCGATAGACAGGTCCACTACGACTTTGGACTG
GGCGTGCCAGGCGATAGCACTCGGAGAGCCGTCAGACGGATGAACACCTTTTACGAAGCCGGGAT
GACCCTGGGCGAGAAGTTCAGAGTGGGCAACTGCAAGCACCTGAAGATGACCCGGCCTAACAGCA
AGATGGCCCTGAATAGCGAGGCCCTGTCTGTGGTGTCTGAATGTGGCGCCTCTGCCTGTGACGTG
TCCCTGATCGCTATGGACTCCGCCTTTGTGCAGGGCAAAGACTGGGGCGTGAAGAAGTTCATCCG
GCGGGACTTCTACGCCTACAAGGACTTCCTGTGGTGCTTCCCCTTCTCTCTGGTGTTCCTGCAAG
AGATCCAGATCTGCTGTCATGTGTCCTGCCTGTGCTGCATCTGCTGTAGCACCAGAATCTGCCTG
GGCTGTCTGCTGGAACTGTTCCTGAGCAGAGCCCTGAGAGCACTGCACGTGCTGTGGAACGGATT
CCAGCTGCACTGCCAGACCGAGTACAACCAGAAACTGCAAGTGAACCAGTTCAGCGAGAGCAAGA
GCCTGTACCACCGGGAAAAGCAGCTCATTGCCATGGACAGCGCCATCTGCGAAGAGAGAGGCGCC
GCAGGATCTCTGATCTCCTGCGAAACAATGCCCGCCATCCTGAAGCTGCAGAAGAATTGCCTCCT
AAGCCTGCGAACCGCTCTGACACACAACCAGGACTTCAGCATCTACAGACTGTGTTGCAAGCGGG
GCTCCCTGTGCCATGCAAGCCAAGCTAGAAGCCCCGCCTTTCCTAAACCTGTGCGACCTCTGCCA
GCTCCAATCACCAGAATTACCCCTCAGCTCGGCGGCCAGAGCGATTCATCTCAACCTCTGCTGAC
CACCGGCAGACCTCAAGGCTGGCAAGACCAAGCTCTGAGACACACCCAGCAGGCTAGCCCTGCCT
CTTGTGCCACCATCACAATCCCCATCCACTCTGCCGCTCTGGGCGATCATTCTGGCGATCCTGGA
CCAGCCTGGGACACATGTCCTCCACTGCCACTCACAACACTGATCCCTAGGGCTCCTCCACCTTA
CGGCGATTCTACCGCTAGAAGCTGGCCCAGCAGATGTGGACCACTCGGAGGCAACACAACCCTCC
AGCAACTGGGAGAAGCCTCTCAGGCTCCTAGCGGCTCTCTGATCCCTCTCAGACTGCCTCTCCTG
TGGGAAGTTCGGGGCCAGCCTGATTCTTTTGCCGCACTGCACAGCTCCCTGAACGAGCTGGGAGA
GATCGCTAGAGAGCTGCACCAGTTCGCCTTCGACCTGCTGATCAAGAGCCACTTCGTGCAAGGCA
AGGATTGGGGCCTCAAAAAGTTTATCCGCAGAGACTTCTGGGGCATGGAACTGGCCGCCAGCAGA
AGATTCAGCTGGGATCATCATAGCGCAGGCGGCCCACCTAGAGTGCCATCTGTTAGAAGCGGAGC
TGCCCAGGTGCAGCCTAAAGATCCTCTGCCACTGAGAACACTGGCCGGCTGCCTTGCTAGAACAG
CCCATCTTAGACCTGGCGCCGAGTCTCTGCCTCAGCCACAACTGCACTGTACCCTGTGGTTCCAG
TCCAGCGAGCTGTCTCCTACTGGTGCCCCTTGGCCATCTAGACGCCCTACTTGGAGAGGCACCAC
CGTGTCACCAAGAACCGCCACAAGCAGCGCCAGAACCTGTTGTGGCACAAAGTGGCCCTCCAGCC
AAGAAGCCGCTCTCGGACTTGGAAGCGGACTGCTGAGGTTCTCTTGTGGAACCGCCGCCATTCGG
AAGATGCACTTTAGCCTGAAAGAACACCCTCCACCACCTTGTCCTCCAGAGGCTTTCCAAAGAGC
TGCTGGCGAAGGCGGACCTGGTAGAGGTGGTGCTAGAAGAGGTGCTAGGGTGCTGCAGAGCCCAT
TCTGTAGAGCAGGCGCAGGCGAATGGCTGGGCCATCAGAGTCTGAGACATGTCGTCGGCTACGGC
CACCTGGATACAAGCGGAAGCAGCTCTAGCTCCAGCTGGCCTAACTCAAAAATGGCTCTGAACAG
CCTGAACTCCATCGACGACGCCCAGCTGACAAGAATCGCCCCTCCTAGATCTCACTGCTGCTTTT
GGGAAGTGAACGCCCCA
neoMVA protein (no TCE, no HIS Tag)
SEQ ID NO: 543
QNLQNGGGSRSSATLPGRRRRRWLRRRRQPISVAPAGPPRRPNQKPNPPGGARCVIMRPTWPGTS
AFTGMECTLGQVGAPSPRREEDGWRGGHSRFKADVPAPQGPCWGGQPGSAPSSAPPEQSLLDDYW
AQKEKISIPRTHLCWKFEMSYTVGGPPPHVHARPRHWKTDRDYWAQKEKGSSSFLRPSCVPFREL
KNVSVLEGLRQGRLGGPCSCHCPRPSQARLTPVDVAGPFLCLGDPGLFPPVKSSITEISCCTLSS
EENEYLPRPEWQLQYEAGMTLGGKILFFLFLLLPLSPFSLIFLVLGVLSGHSGSRLKRSFAVTER
IITGGKSTCSAPGPQSLPSTPFSTYPQWVILITELDGHSYTSKVNCLLLQDGFHGCVSITGAAGR
RNLSIFLFLMLCKLEFHACQWQHYHRSGEAAGTPLWRPTRNVAMMVPDRQVHYDFGLKIQNKNCP
DVLRFLDLKVRYLHSVPFRELKNQRTAQGAPGIHHAASPVAANLCDPARHAQHTRIPCGAGQVRA
GRGPEAGGGVLQPQRPAPEKPGCPCRRGQPRLHTVKMWRACHLFLQPQVGTPPPHTASARAPSGP
PHPHESCPAGRRPARAAQTCARRQHGLPGCEEAGTARVPSLHLHLHQAALGAGRGRGWGEACAQV
PPSRGHYKLIQQPISLFSITDRLHKTFSQLPSVHLCSITFQWGHPPIFCSTNDICVTANFCISVT
FLKPCFLLHEASASQFKKFDGPCGERGGGRTARALWARGDSVLTPALDPQTPVRAPSLTRAAAAV
GVPGDSTRRAVRRMNTFCGASACDVSLIAMDSACEERGAAGSLISCESLYHREKQLIAMDSAIFV
QGKDWGVKKFIRRDFTMPAILKLQKNCLLSLNSKMALNSEALSVVSEYEAGMTLGEKFRVGNCKH
LKMTRPTEYNQKLQVNQFSESKRTALTHNQDFSTYRLCCKRGSLCHASQARSPAFPKPVRPLPAP
ITRITPQLGGQSDSSQPLLTTGRPQGWQDQALRHTQQASPASCATITIPIHSAALGDHSGDPGPA
WDTCPPLPLTTLIPRAPPPYGDSTARSWPSRCGPLGYAYKDFLWCFPFSLVFLQEIQICCHVSCL
CCICCSTRICLGCLLELFLSRALRALHVLWNGFQLHCQGNTTLQQLGEASQAPSGSLIPLRLPLL
WEVRGNSKMALNSLNSIDDAQLTRIAPPRSHCCFWEVNAPFVQGKDWGLKKFIRRDFEAFQRAAG
EGGPGRGGARRGARVLQSPFCRAGAGEWLGHQSLRWGMELAASRRFSWDHHSAGGPPRVPSVRSG
AAQVQPKDPLPLRTLAGCLARTAHLRPGAESLPQPQLHCTIARELHQFAFDLLIKSHKMHFSLKE
HPPPPCPPHVVGYGHLDTSGSSSSSSWPQPDSFAALHSSLNELGELWFQSSELSPTGAPWPSRRP
TWRGTTVSPRTATSSARTCCGTKWPSSQEAALGLGSGLLRFSCGTAAIR
(with extended sequences of FUS1 and FUS29/P22 and
without TCE and His-tag)
SEQ ID NO: 1005
QNLQNGGGSRSSATLPGRRRRRWLRRRRQPISVAPAGPPRRPNQKPNPPGGARCVIMRPTWPGTS
AFTGMECTLGQVGAPSPRREEDGWRGGHSRFKADVPAPQGPCWGGQPGSAPSSAPPEQSLLDDYW
AQKEKISIPRTHLCWKFEMSYTVGGPPPHVHARPRHWKTDRDYWAQKEKGSSSFLRPSCVPFREL
KNVSVLEGLRQGRLGGPCSCHCPRPSQARLTPVDVAGPFLCLGDPGLFPPVKSSITEISCCTLSS
EENEYLPRPEWQLQYEAGMTLGGKILFFLFLLLPLSPFSLIFLVLGVLSGHSGSRLKRSFAVTER
IITGGKSTCSAPGPQSLPSTPFSTYPQWVILITELDGHSYTSKVNCLLLQDGFHGCVSITGAAGR
RNLSIFLFLMLCKLEFHACQWQHYHRSGEAAGTPLWRPTRNVAMMVPDRQVHYDFGLKIQNKNCP
DVLRFLDLKVRYLHSVPFRELKNQRTAQGAPGIHHAASPVAANLCDPARHAQHTRIPCGAGQVRA
GRGPEAGGGVLQPQRPAPEKPGCPCRRGQPRLHTVKMWRACHLFLQPQVGTPPPHTASARAPSGP
PHPHESCPAGRRPARAAQTCARRQHGLPGCEEAGTARVPSLHLHLHQAALGAGRGRGWGEACAQV
PPSRGHYKLIQQPISLFSITDRLHKTFSQLPSVHLCSITFQWGHPPIFCSTNDICVTANFCISVT
FLKPCFLLHEASASQFKKFDGPCGERGGGRTARALWARGDSVLTPALDPQTPVRAPSLTRAAAAV
GVPGDSTRRAVRRMNTFGASACDVSLIAMDSAITLWCEERGAAGSLISCESLYHREKQLIAMDSA
ITLWIFVQGKDWGVKKFIRRDFTMPAILKLQKNCLLSLNSKMALNSEALSVVSEYEAGMTLGEKF
RVGNCKHLKMTRPTEYNQKLQVNQFSESKRTALTHNQDFSTYRLCCKRGSLCHASQARSPAFPKP
VRPLPAPITRITPQLGGQSDSSQPLLTTGRPQGWQDQALRHTQQASPASCATITIPIHSAALGDH
SGDPGPAWDTCPPLPLTTLIPRAPPPYGDSTARSWPSRCGPLGYAYKDFLWCFPFSLVFLQEIQI
CCHVSCLCCICCSTRICLGCLLELFLSRALRALHVLWNGFQLHCQGNTTLQQLGEASQAPSGSLI
PLRLPLLWEVRGNSKMALNSLNSIDDAQLTRIAPPRSHCCFWEVNAPFVQGKDWGLKKFIRRDFE
AFQRAAGEGGPGRGGARRGARVLQSPFCRAGAGEWLGHQSLRWGMELAASRRFSWDHHSAGGPPR
VPSVRSGAAQVQPKDPLPLRTLAGCLARTAHLRPGAESLPQPQLHCTIARELHQFAFDLLIKSHK
MHFSLKEHPPPPCPPHVVGYGHLDTSGSSSSSSWPQPDSFAALHSSLNELGELWFQSSELSPTGA
PWPSRRPTWRGTTVSPRTATSSARTCCGTKWPSSQEAALGLGSGLLRFSCGTAAIR
neoMVA polynucleotide
SEQ ID NO: 544
CAGAACCTGCAGAACGGCGGAGGCTCTAGAAGCTCTGCTACACTTCCTGGCAGGCGGCGGAGAAG
ATGGCTGAGAAGAAGGCGGCAGCCTATCTCTGTGGCTCCTGCTGGACCTCCTAGACGGCCCAACC
AGAAGCCTAATCCTCCTGGCGGAGCCAGATGCGTGATCATGAGGCCTACATGGCCTGGCACCAGC
GCCTTTACCGGCATGGAATGTACACTGGGCCAAGTGGGAGCCCCATCTCCTAGAAGAGAAGAGGA
TGGCTGGCGCGGAGGCCACTCTAGATTCAAAGCTGATGTGCCCGCTCCTCAGGGCCCTTGTTGGG
GAGGACAACCTGGATCTGCCCCATCTTCTGCCCCACCTGAACAGAGCCTGCTGGATGACTATTGG
GCTCAAAAAGAGAAGATCAGCATCCCCAGAACACACCTGTGCTGGAAGTTCGAGATGAGCTACAC
CGTTGGCGGCCCTCCACCACATGTTCACGCCAGACCTAGACACTGGAAAACCGACAGAGATTATT
GGGCCCAGAAAGAAAAGGGCAGCAGCAGCTTCCTGCGGCCTAGCTGTGTGCCCTTCCGGGAACTG
AAGAACGTGTCCGTTCTGGAAGGCCTGAGGCAGGGCAGACTTGGCGGACCTTGTAGCTGCCACTG
TCCTAGACCAAGCCAGGCCAGACTGACCCCTGTGGATGTGGCTGGCCCATTTCTGTGTCTGGGCG
ACCCTGGACTGTTCCCTCCAGTGAAGTCTAGCATCACCGAGATCAGCTGCTGCACCCTGAGCAGC
GAGGAAAACGAGTACCTGCCTAGACCTGAATGGCAGCTGCAGTACGAGGCCGGCATGACACTCGG
AGGCAAGATCCTGTTCTTCCTGTTCCTGCTGCTCCCTCTGAGCCCCTTCAGCCTGATCTTTCTGG
TGCTGGGCGTGCTGTCTGGCCACTCTGGAAGCAGACTGAAGAGAAGCTTCGCCGTGACCGAGCGG
ATCATCACAGGCGGCAAGAGCACATGTTCTGCCCCTGGACCTCAGTCTCTGCCCAGCACACCCTT
CAGCACATACCCTCAGTGGGTCATCCTGATCACCGAGCTGGATGGCCACAGCTACACCAGCAAAG
TGAACTGCCTCCTGCTGCAGGATGGCTTCCACGGCTGTGTGTCTATTACTGGCGCCGCTGGCAGA
CGGAACCTGAGCATCTTTCTGTTTCTGATGCTGTGCAAGCTCGAGTTCCACGCCTGCCAATGGCA
GCACTACCACAGATCTGGCGAAGCCGCTGGAACCCCACTTTGGAGGCCTACCAGAAACGTGGCCA
TGATGGTGCCCGACAGACAGGTGCACTACGACTTCGGCCTGAAGATCCAGAACAAGAACTGCCCC
GACGTGCTGCGGTTCCTGGATCTCAAAGTGCGCTACCTGCACAGCGTGCCCTTCAGAGAGCTGAA
AAACCAGAGAACAGCCCAGGGCGCTCCTGGAATCCATCATGCTGCTTCTCCAGTGGCCGCCAATC
TGTGCGATCCTGCCAGACATGCCCAGCATACCAGGATTCCTTGTGGCGCTGGACAAGTGCGCGCT
GGAAGAGGACCTGAAGCTGGTGGCGGAGTTCTGCAGCCTCAAAGACCTGCTCCTGAGAAGCCTGG
CTGCCCCTGTAGAAGAGGACAGCCTAGACTGCACACCGTGAAGATGTGGCGGGCCTGCCACTTGT
TTCTCCAGCCACAAGTGGGCACCCCTCCACCTCATACAGCCTCTGCTAGAGCACCTAGCGGCCCA
CCTCATCCTCACGAATCTTGTCCTGCCGGAAGAAGGCCTGCCAGAGCCGCTCAAACATGTGCCAG
ACGACAGCACGGACTGCCCGGATGTGAAGAAGCCGGAACAGCCAGAGTGCCTAGCCTGCACCTTC
ATCTGCATCAGGCCGCTCTTGGAGCCGGAAGAGGTAGAGGATGGGGAGAAGCTTGTGCCCAGGTG
CCACCTTCTAGAGGCCACTACAAGCTGATCCAGCAGCCAATCAGCCTGTTCTCCATCACCGACCG
GCTGCACAAGACATTCAGCCAGCTGCCTTCCGTGCATCTGTGCAGCATCACCTTCCAGTGGGGAC
ACCCTCCTATCTTTTGCTCCACCAACGACATCTGCGTGACCGCCAACTTCTGTATCAGCGTGACC
TTCCTGAAGCCTTGCTTTCTGCTGCACGAGGCCTCCGCCAGCCAGTTTAAGAAGTTTGACGGCCC
CTGCGGCGAGAGAGGCGGAGGAAGAACTGCAAGAGCCCTTTGGGCCAGAGGCGACTCTGTTCTGA
CACCAGCTCTGGACCCTCAGACACCTGTTAGGGCCCCTAGCCTGACAAGAGCTGCCGCTGCTGTT
GGAGTGCCTGGCGATTCTACTAGAAGGGCCGTGCGGCGGATGAACACCTTTTGTGGCGCATCTGC
CTGCGACGTGTCCCTGATCGCTATGGATAGCGCCTGCGAGGAAAGAGGCGCAGCCGGATCTCTGA
TCTCTTGCGAGAGCCTGTACCACCGGGAAAAGCAGCTCATTGCCATGGACAGCGCCATCTTCGTG
CAGGGCAAAGACTGGGGCGTGAAGAAGTTCATCCGGCGGGACTTTACCATGCCTGCCATTCTGAA
GCTGCAGAAGAATTGTCTTCTAAGCCTGAACAGCAAGATGGCCCTGAATAGCGAGGCCCTGTCTG
TGGTGTCCGAGTATGAGGCTGGAATGACCCTGGGCGAGAAGTTCAGAGTGGGCAACTGCAAGCAC
CTGAAGATGACCCGGCCTACCGAGTACAACCAGAAACTGCAAGTGAACCAGTTCAGCGAGAGCAA
GCGGACCGCTCTGACCCACAACCAGGACTTCAGCATCTACCGGCTGTGCTGCAAGAGGGGCTCTC
TGTGTCATGCTAGCCAGGCTAGAAGCCCCGCCTTTCCTAAGCCTGTCAGACCTCTGCCTGCTCCT
ATCACCAGAATCACCCCTCAGCTCGGCGGCCAGTCTGATTCATCTCAGCCACTGCTGACCACCGG
CAGACCTCAAGGATGGCAAGACCAGGCTCTGAGACACACACAGCAGGCTAGCCCAGCCTCTTGCG
CCACCATCACAATACCAATACATTCTGCCGCTCTGGGCGATCACAGCGGAGATCCTGGACCTGCC
TGGGATACTTGTCCTCCTCTGCCCCTAACTACACTGATCCCTAGGGCTCCTCCACCTTACGGCGA
TAGCACAGCCAGATCCTGGCCTAGCAGATGTGGCCCTCTGGGCTACGCCTACAAGGACTTCCTGT
GGTGCTTCCCCTTCTCTCTGGTGTTCCTGCAAGAAATCCAGATCTGCTGTCACGTGTCCTGCCTG
TGCTGTATCTGCTGTAGCACCCGGATCTGTCTGGGCTGTCTGCTGGAACTGTTCCTGAGCAGAGC
CCTGAGAGCACTGCACGTGCTGTGGAACGGATTCCAGCTGCACTGCCAGGGCAACACCACACTGC
AACAGCTGGGAGAAGCCTCTCAGGCCCCAAGCGGTTCTCTGATCCCTCTCAGACTGCCCCTCCTG
TGGGAAGTGCGGGGCAATTCTAAGATGGCTCTCAACAGCCTGAACTCCATCGACGACGCCCAGCT
GACAAGAATCGCCCCTCCAAGAAGCCACTGTTGCTTTTGGGAAGTGAACGCCCCTTTTGTGCAGG
GTAAAGATTGGGGCCTCAAAAAGTTTATCAGACGGGACTTCGAGGCTTTCCAGAGAGCAGCTGGC
GAAGGCGGACCTGGCAGAGGTGGTGCTAGAAGAGGTGCTAGAGTGCTGCAGAGCCCATTCTGTAG
AGCTGGCGCTGGCGAATGGCTGGGCCACCAATCTCTTAGATGGGGAATGGAACTGGCCGCTAGCA
GGCGGTTTAGCTGGGATCATCATTCTGCCGGCGGACCTCCAAGAGTGCCAAGCGTTAGAAGCGGA
GCAGCCCAGGTCCAGCCTAAAGATCCACTGCCACTGAGAACACTGGCCGGCTGCCTTGCCAGAAC
AGCTCATCTTAGACCTGGCGCCGAAAGCCTGCCTCAACCTCAGCTGCATTGCACAATCGCCAGAG
AACTGCACCAGTTCGCCTTCGACCTGCTGATCAAGAGCCACAAGATGCACTTCTCACTGAAAGAG
CACCCGCCACCGCCGTGCCCACCGCACGTTGTCGGCTATGGCCACCTGGATACAAGCGGCTCCTC
TAGCAGTAGCTCCTGGCCTCAGCCTGACAGCTTTGCTGCCCTGCATAGCTCCCTGAATGAGCTGG
GCGAACTGTGGTTCCAGTCCAGCGAACTGTCTCCTACTGGCGCTCCATGGCCAAGCAGAAGGCCT
ACTTGGAGAGGCACCACCGTGTCTCCAAGAACCGCTACAAGCAGCGCCAGAACCTGTTGCGGCAC
AAAATGGCCCTCCAGCCAAGAAGCTGCCCTCGGACTTGGAAGCGGACTGCTGAGATTCAGCTGTG
GCACAGCCGCCATCAGA
neoGAd20 expression cassette protein
SEQ ID NO: 550
MGQKEQIHTLQKNSERMSKQLTRSSQAVQNLQNGGGSRSSATLPGRRRRRWLRRRRQPISVAPAG
PPRRPNQKPNPPGGARCVIMRPTWPGTSAFTKRSFAVTERIIDYWAQKEKGSSSFLRPSCDYWAQ
KEKISIPRTHLCLVLGVLSGHSGSRLYEAGMTLGGKILFFLELLLPLSPFSLIFTEISCCTLSSE
ENEYLPRPEWQLQVPFRELKNVSVLEGLRQGRLGGPCSCHCPRPSQARLTPVDVAGPFLCLGDPG
LFPPVKSSITGGKSTCSAPGPQSLPSTPFSTYPQWVILITELGMECTLGQVGAPSPRREEDGWRG
GHSRFKADVPAPQGPCWGGQPGSAPSSAPPEQSLLDWKFEMSYTVGGPPPHVHARPRHWKTDRDG
HSYTSKVNCLLLQDGFHGCVSITGAAGRRNLSIFLFLMLCKLEFHACKIQNKNCPDFKKEDGPCG
ERGGGRTARALWARGDSVLTPALDPQTPVRAPSLTRAAAAVHYKLIQQPISLFSITDRLHKTFSQ
LPSVHLCSITFQWGHPPIFCSTNDICVTANFCISVTFLKPCFLLHEASASQCHLFLQPQVGTPPP
HTASARAPSGPPHPHESCPAGRRPARAAQTCARRQHGLPGCEEAGTARVPSLHLHLHQAALGAGR
GRGWGEACAQVPPSRGVLRFLDLKVRYLHSQWQHYHRSGEAAGTPLWRPTRNVPFRELKNQRTAQ
GAPGIHHAASPVAANLCDPARHAQHTRIPCGAGQVRAGRGPEAGGGVLQPQRPAPEKPGCPCRRG
QPRLHTVKMWRAVAMMVPDRQVHYDFGLGVPGDSTRRAVRRMNTFYEAGMTLGEKFRVGNCKHLK
MTRPNSKMALNSEALSVVSECGASACDVSLIAMDSAFVQGKDWGVKKFIRRDFYAYKDFLWCFPF
SLVFLQEIQICCHVSCLCCICCSTRICLGCLLELFLSRALRALHVLWNGFQLHCQTEYNQKLQVN
QFSESKSLYHREKQLIAMDSAICEERGAAGSLISCETMPAILKLQKNCLLSLRTALTHNQDFSTY
RLCCKRGSLCHASQARSPAFPKPVRPLPAPITRITPQLGGQSDSSQPLLTTGRPQGWQDQALRHT
QQASPASCATITIPIHSAALGDHSGDPGPAWDTCPPLPLTTLIPRAPPPYGDSTARSWPSRCGPL
GGNTTLQQLGEASQAPSGSLIPLRLPLLWEVRGQPDSFAALHSSLNELGEIARELHQFAFDLLIK
SHFVQGKDWGLKKEIRRDFWGMELAASRRFSWDHHSAGGPPRVPSVRSGAAQVQPKDPLPLRTLA
GCLARTAHLRPGAESLPQPQLHCTLWFQSSELSPTGAPWPSRRPTWRGTTVSPRTATSSARTCCG
TKWPSSQEAALGLGSGLLRFSCGTAAIRKMHFSLKEHPPPPCPPEAFQRAAGEGGPGRGGARRGA
RVLQSPFCRAGAGEWLGHQSLRHVVGYGHLDTSGSSSSSSWPNSKMALNSLNSIDDAQLTRIAPP
RSHCCFWEVNAP
neoGAd20 expression cassette polynucleotide
SEQ ID NO: 551
Ccattgcatacgttgtatccatatcataatatgtacatttatattggctcatgtccaacattacc
gccatgttgacattgattattgactagttattaatagtaatcaattacggggtcattagttcata
gcccatatatggagttccgcgttacataacttacggtaaatggcccgcctggctgaccgcccaac
gacccccgcccattgacgtcaataatgacgtatgttcccatagtaacgccaatagggactttcca
ttgacgtcaatgggtggagtatttacggtaaactgcccacttggcagtacatcaagtgtatcata
tgccaagtacgccccctattgacgtcaatgacggtaaatggcccgcctggcattatgcccagtac
atgaccttatgggactttcctacttggcagtacatctacgtattagtcatcgctattaccatggt
gatgcggttttggcagtacatcaatgggcgtggatagcggtttgactcacggggatttccaagtc
tccaccccattgacgtcaatgggagtttgttttggcaccaaaatcaacgggactttccaaaatgt
cgtaacaactccgccccattgacgcaaatgggcggtaggcgtgtacggtgggaggtctatataag
cagagctctccctatcagtgatagagatctccctatcagtgatagagatcgtcgacgagctcgtt
tagtgaaccgtcagatcgcctggagacgccatccacgctgttttgacctccatagaagacaccgg
gaccgatccagcctccgcggccgggaacggtgcattggaacgcggattccccgtgccaagagtga
gatcttccgtttatctaggtaccagatatcaGAATTCGGATCCCGCGACTTCGCCGCCATGGGCC
AGAAAGAGCAGATCCACACACTGCAGAAAAACAGCGAGCGGATGAGCAAGCAGCTGACCA
GATCTTCTCAGGCCGTGCAGAACCTGCAGAACGGCGGAGGCTCTAGAAGCTCTGCTA
CACTTCCTGGCAGGCGGCGGAGAAGATGGCTGAGAAGAAGGCGGCAGCCTATCTCT
GTGGCTCCTGCTGGACCTCCTAGACGGCCCAACCAGAAGCCTAATCCTCCTGGCGGA
GCCAGATGCGTGATCATGAGGCCTACATGGCCTGGCACCAGCGCCTTCACCAAGAG
AAGCTTTGCCGTGACCGAGCGGATCATCGACTATTGGGCTCAAAAAGAGAAGGGCA
GCAGCAGCTTCCTGCGGCCTAGCTGTGATTATTGGGCCCAGAAAGAAAAGATCAGC
ATCCCCAGAACACACCTGTGCCTGGTGCTGGGAGTGCTGTCTGGACACTCTGGCAGC
AGACTGTATGAGGCCGGCATGACACTCGGCGGCAAGATCCTGTTCTTCCTGTTCCTG
CTGCTCCCTCTGAGCCCCTTCAGCCTGATCTTCACCGAGATCAGCTGCTGCACCCTGA
GCAGCGAGGAAAACGAGTACCTGCCTAGACCTGAGTGGCAGCTGCAGGTCCCCTTC
AGAGAGCTGAAGAACGTTTCCGTGCTGGAAGGCCTGAGACAGGGCAGACTTGGCGG
CCCTTGTAGCTGTCACTGCCCCAGACCTAGTCAGGCCAGACTGACACCTGTGGATGT
GGCCGGACCTTTCCTGTGTCTGGGAGATCCTGGCCTGTTTCCACCTGTGAAGTCCAG
CATCACAGGCGGCAAGTCCACATGTTCTGCCCCTGGACCTCAGAGCCTGCCTAGCAC
ACCCTTCAGCACATACCCTCAGTGGGTCATCCTGATCACCGAACTCGGCATGGAATG
CACCCTGGGACAAGTGGGAGCCCCATCTCCTAGAAGAGAAGAGGATGGCTGGCGCG
GAGGCCACTCTAGATTCAAAGCTGATGTGCCCGCTCCTCAGGGCCCTTGTTGGGGAG
GACAACCTGGATCTGCCCCATCTTCTGCCCCACCTGAACAGTCCCTGCTGGATTGGA
AGTTCGAGATGAGCTACACCGTCGGCGGACCTCCACCTCATGTTCATGCCAGACCTC
GGCACTGGAAAACCGACAGAGATGGCCACAGCTACACCAGCAAAGTGAACTGCCTC
CTGCTGCAGGATGGCTTCCACGGCTGTGTGTCTATTACTGGCGCCGCTGGCAGACGG
AACCTGAGCATCTTTCTGTTTCTGATGCTGTGCAAGCTCGAGTTCCACGCCTGCAAG
ATCCAGAACAAGAACTGCCCCGACTTCAAGAAGTTCGACGGCCCTTGCGGAGAAAG
AGGCGGAGGCAGAACAGCTAGAGCCCTTTGGGCTAGAGGCGACAGCGTTCTGACAC
CAGCTCTGGACCCTCAGACACCTGTTAGGGCCCCTAGCCTGACAAGAGCTGCCGCCG
CTGTGCACTACAAGCTGATCCAGCAGCCAATCAGCCTGTTCAGCATCACCGACCGGC
TGCACAAGACATTCAGCCAGCTGCCAAGCGTGCACCTGTGCTCCATCACCTTCCAGT
GGGGACACCCTCCTATCTTTTGCTCCACCAACGACATCTGCGTGACCGCCAACTTCT
GTATCAGCGTGACCTTCCTGAAGCCTTGCTTTCTGCTGCACGAGGCCAGCGCCTCTC
AGTGCCACTTGTTTCTGCAGCCCCAAGTGGGCACACCTCCTCCACATACAGCCTCTG
CTAGAGCACCTAGCGGCCCTCCACATCCTCACGAATCTTGTCCTGCCGGAAGAAGGC
CTGCCAGAGCCGCTCAAACATGTGCCAGACGACAGCACGGACTGCCTGGATGTGAA
GAGGCTGGAACAGCCAGAGTGCCTAGCCTGCACCTCCATCTGCATCAGGCTGCTCTT
GGAGCCGGAAGAGGTAGAGGATGGGGCGAAGCTTGTGCTCAGGTGCCACCTTCTAG
AGGCGTGCTGAGATTCCTGGACCTGAAAGTGCGCTACCTGCACAGCCAGTGGCAGC
ACTATCACAGATCTGGCGAAGCCGCCGGAACACCCCTTTGGAGGCCAACAAGAAAC
GTGCCCTTCCGGGAACTGAAGAACCAGAGAACAGCTCAGGGCGCTCCTGGAATCCA
CCATGCTGCTTCTCCAGTGGCCGCCAACCTGTGTGATCCTGCCAGACATGCCCAGCA
CACCAGGATTCCTTGTGGCGCTGGACAAGTGCGCGCTGGAAGAGGACCTGAAGCAG
GCGGAGGTGTTCTGCAACCTCAAAGACCCGCTCCTGAGAAGCCTGGCTGCCCTTGCA
GAAGAGGACAGCCTAGACTGCACACCGTGAAAATGTGGCGAGCCGTGGCCATGATG
GTGCCCGATAGACAGGTCCACTACGACTTTGGACTGGGCGTGCCAGGCGATAGCACT
CGGAGAGCCGTCAGACGGATGAACACCTTTTACGAAGCCGGGATGACCCTGGGCGA
GAAGTTCAGAGTGGGCAACTGCAAGCACCTGAAGATGACCCGGCCTAACAGCAAGA
TGGCCCTGAATAGCGAGGCCCTGTCTGTGGTGTCTGAATGTGGCGCCTCTGCCTGTG
ACGTGTCCCTGATCGCTATGGACTCCGCCTTTGTGCAGGGCAAAGACTGGGGCGTGA
AGAAGTTCATCCGGCGGGACTTCTACGCCTACAAGGACTTCCTGTGGTGCTTCCCCT
TCTCTCTGGTGTTCCTGCAAGAGATCCAGATCTGCTGTCATGTGTCCTGCCTGTGCTG
CATCTGCTGTAGCACCAGAATCTGCCTGGGCTGTCTGCTGGAACTGTTCCTGAGCAG
AGCCCTGAGAGCACTGCACGTGCTGTGGAACGGATTCCAGCTGCACTGCCAGACCG
AGTACAACCAGAAACTGCAAGTGAACCAGTTCAGCGAGAGCAAGAGCCTGTACCAC
CGGGAAAAGCAGCTCATTGCCATGGACAGCGCCATCTGCGAAGAGAGAGGCGCCGC
AGGATCTCTGATCTCCTGCGAAACAATGCCCGCCATCCTGAAGCTGCAGAAGAATTG
CCTCCTAAGCCTGCGAACCGCTCTGACACACAACCAGGACTTCAGCATCTACAGACT
GTGTTGCAAGCGGGGCTCCCTGTGCCATGCAAGCCAAGCTAGAAGCCCCGCCTTTCC
TAAACCTGTGCGACCTCTGCCAGCTCCAATCACCAGAATTACCCCTCAGCTCGGCGG
CCAGAGCGATTCATCTCAACCTCTGCTGACCACCGGCAGACCTCAAGGCTGGCAAGA
CCAAGCTCTGAGACACACCCAGCAGGCTAGCCCTGCCTCTTGTGCCACCATCACAAT
CCCCATCCACTCTGCCGCTCTGGGCGATCATTCTGGCGATCCTGGACCAGCCTGGGA
CACATGTCCTCCACTGCCACTCACAACACTGATCCCTAGGGCTCCTCCACCTTACGG
CGATTCTACCGCTAGAAGCTGGCCCAGCAGATGTGGACCACTCGGAGGCAACACAA
CCCTCCAGCAACTGGGAGAAGCCTCTCAGGCTCCTAGCGGCTCTCTGATCCCTCTCA
GACTGCCTCTCCTGTGGGAAGTTCGGGGCCAGCCTGATTCTTTTGCCGCACTGCACA
GCTCCCTGAACGAGCTGGGAGAGATCGCTAGAGAGCTGCACCAGTTCGCCTTCGACC
TGCTGATCAAGAGCCACTTCGTGCAAGGCAAGGATTGGGGCCTCAAAAAGTTTATCC
GCAGAGACTTCTGGGGCATGGAACTGGCCGCCAGCAGAAGATTCAGCTGGGATCAT
CATAGCGCAGGCGGCCCACCTAGAGTGCCATCTGTTAGAAGCGGAGCTGCCCAGGT
GCAGCCTAAAGATCCTCTGCCACTGAGAACACTGGCCGGCTGCCTTGCTAGAACAGC
CCATCTTAGACCTGGCGCCGAGTCTCTGCCTCAGCCACAACTGCACTGTACCCTGTG
GTTCCAGTCCAGCGAGCTGTCTCCTACTGGTGCCCCTTGGCCATCTAGACGCCCTACT
TGGAGAGGCACCACCGTGTCACCAAGAACCGCCACAAGCAGCGCCAGAACCTGTTG
TGGCACAAAGTGGCCCTCCAGCCAAGAAGCCGCTCTCGGACTTGGAAGCGGACTGC
TGAGGTTCTCTTGTGGAACCGCCGCCATTCGGAAGATGCACTTTAGCCTGAAAGAAC
ACCCTCCACCACCTTGTCCTCCAGAGGCTTTCCAAAGAGCTGCTGGCGAAGGCGGAC
CTGGTAGAGGTGGTGCTAGAAGAGGTGCTAGGGTGCTGCAGAGCCCATTCTGTAGA
GCAGGCGCAGGCGAATGGCTGGGCCATCAGAGTCTGAGACATGTCGTCGGCTACGG
CCACCTGGATACAAGCGGAAGCAGCTCTAGCTCCAGCTGGCCTAACTCAAAAATGG
CTCTGAACAGCCTGAACTCCATCGACGACGCCCAGCTGACAAGAATCGCCCCTCCTA
GATCTCACTGCTGCTTTTGGGAAGTGAACGCCCCAAGCCATCACCATCACCACCATT
AGTAAAGGCGCGCCTAGCGGCCGCgatctgctgtgccttctagttgccagccatctg
ttgtttgcccctcccccgtgccttccttgaccctggaaggtgccactcccactgtcc
tttcctaataaaatgaggaaattgcatcgcattgtctgagtaggtgtcattctattc
tggggggtggggtggggcaggacagcaagggggaggattgggaagacaatagcaggc
atgctggggatgcggtgggctctatggcc
neoMVA expression cassette protein
SEQ ID NO: 552
MGQKEQIHTLQKNSERMSKQLTRSSQAVQNLQNGGGSRSSATLPGRRRRRWLRRRRQPISVAPAG
PPRRPNQKPNPPGGARCVIMRPTWPGTSAFTGMECTLGQVGAPSPRREEDGWRGGHSRFKADVPA
PQGPCWGGQPGSAPSSAPPEQSLLDDYWAQKEKISIPRTHLCWKFEMSYTVGGPPPHVHARPRHW
KTDRDYWAQKEKGSSSFLRPSCVPFRELKNVSVLEGLRQGRLGGPCSCHCPRPSQARLTPVDVAG
PFLCLGDPGLFPPVKSSITEISCCTLSSEENEYLPRPEWQLQYEAGMTLGGKILFFLFLLLPLSP
FSLIFLVLGVLSGHSGSRLKRSFAVTERIITGGKSTCSAPGPQSLPSTPFSTYPQWVILITELDG
HSYTSKVNCLLLQDGFHGCVSITGAAGRRNLSIFLFLMLCKLEFHACQWQHYHRSGEAAGTPLWR
PTRNVAMMVPDRQVHYDFGLKIQNKNCPDVLRFLDLKVRYLHSVPFRELKNQRTAQGAPGIHHAA
SPVAANLCDPARHAQHTRIPCGAGQVRAGRGPEAGGGVLQPQRPAPEKPGCPCRRGQPRLHTVKM
WRACHLFLQPQVGTPPPHTASARAPSGPPHPHESCPAGRRPARAAQTCARRQHGLPGCEEAGTAR
VPSLHLHLHQAALGAGRGRGWGEACAQVPPSRGHYKLIQQPISLFSITDRLHKTFSQLPSVHLCS
ITFQWGHPPIFCSTNDICVTANFCISVTFLKPCFLLHEASASQFKKFDGPCGERGGGRTARALWA
RGDSVLTPALDPQTPVRAPSLTRAAAAVGVPGDSTRRAVRRMNTFCGASACDVSLIAMDSACEER
GAAGSLISCESLYHREKQLIAMDSAIFVQGKDWGVKKFIRRDFTMPAILKLQKNCLLSLNSKMAL
NSEALSVVSEYEAGMTLGEKFRVGNCKHLKMTRPTEYNQKLQVNQFSESKRTALTHNQDFSIYRL
CCKRGSLCHASQARSPAFPKPVRPLPAPITRITPQLGGQSDSSQPLLTTGRPQGWQDQALRHTQQ
ASPASCATITIPIHSAALGDHSGDPGPAWDTCPPLPLTTLIPRAPPPYGDSTARSWPSRCGPLGY
AYKDFLWCFPFSLVFLQEIQICCHVSCLCCICCSTRICLGCLLELFLSRALRALHVLWNGFQLHC
QGNTTLQQLGEASQAPSGSLIPLRLPLLWEVRGNSKMALNSLNSIDDAQLTRIAPPRSHCCFWEV
NAPFVQGKDWGLKKFIRRDFEAFQRAAGEGGPGRGGARRGARVLQSPFCRAGAGEWLGHQSLRWG
MELAASRRFSWDHHSAGGPPRVPSVRSGAAQVQPKDPLPLRTLAGCLARTAHLRPGAESLPQPQL
HCTIARELHQFAFDLLIKSHKMHFSLKEHPPPPCPPHVVGYGHLDTSGSSSSSSWPQPDSFAALH
SSLNELGELWFQSSELSPTGAPWPSRRPTWRGTTVSPRTATSSARTCCGTKWPSSQEAALGLGSG
LLRFSCGTAAIR
neoMVA expression cassette polynucleotide
SEQ ID NO: 553
gatcactaattccaaacccacccgctttttatagtaagtttttcacccataaataataaatacaa
taattaatttctcgtaaaagtagaaaatatattctaatttattgcacggtaaggaagtagaatca
taaagaacagtgacGGATCCCGCGACTTCGCCGCCATGGGCCAGAAAGAGCAGATCCACACACTG
CAGAAAAACAGCGAGCGGATGAGCAAGCAGCTGACCAGATCTTCTCAGGCCGTGCAGAACCTGCA
GAACGGCGGAGGCTCTAGAAGCTCTGCTACACTTCCTGGCAGGCGGCGGAGAAGATGGCTGAGAA
GAAGGCGGCAGCCTATCTCTGTGGCTCCTGCTGGACCTCCTAGACGGCCCAACCAGAAGCCTAAT
CCTCCTGGCGGAGCCAGATGCGTGATCATGAGGCCTACATGGCCTGGCACCAGCGCCTTTACCGG
CATGGAATGTACACTGGGCCAAGTGGGAGCCCCATCTCCTAGAAGAGAAGAGGATGGCTGGCGCG
GAGGCCACTCTAGATTCAAAGCTGATGTGCCCGCTCCTCAGGGCCCTTGTTGGGGAGGACAACCT
GGATCTGCCCCATCTTCTGCCCCACCTGAACAGAGCCTGCTGGATGACTATTGGGCTCAAAAAGA
GAAGATCAGCATCCCCAGAACACACCTGTGCTGGAAGTTCGAGATGAGCTACACCGTTGGCGGCC
CTCCACCACATGTTCACGCCAGACCTAGACACTGGAAAACCGACAGAGATTATTGGGCCCAGAAA
GAAAAGGGCAGCAGCAGCTTCCTGCGGCCTAGCTGTGTGCCCTTCCGGGAACTGAAGAACGTGTC
CGTTCTGGAAGGCCTGAGGCAGGGCAGACTTGGCGGACCTTGTAGCTGCCACTGTCCTAGACCAA
GCCAGGCCAGACTGACCCCTGTGGATGTGGCTGGCCCATTTCTGTGTCTGGGCGACCCTGGACTG
TTCCCTCCAGTGAAGTCTAGCATCACCGAGATCAGCTGCTGCACCCTGAGCAGCGAGGAAAACGA
GTACCTGCCTAGACCTGAATGGCAGCTGCAGTACGAGGCCGGCATGACACTCGGAGGCAAGATCC
TGTTCTTCCTGTTCCTGCTGCTCCCTCTGAGCCCCTTCAGCCTGATCTTTCTGGTGCTGGGCGTG
CTGTCTGGCCACTCTGGAAGCAGACTGAAGAGAAGCTTCGCCGTGACCGAGCGGATCATCACAGG
CGGCAAGAGCACATGTTCTGCCCCTGGACCTCAGTCTCTGCCCAGCACACCCTTCAGCACATACC
CTCAGTGGGTCATCCTGATCACCGAGCTGGATGGCCACAGCTACACCAGCAAAGTGAACTGCCTC
CTGCTGCAGGATGGCTTCCACGGCTGTGTGTCTATTACTGGCGCCGCTGGCAGACGGAACCTGAG
CATCTTTCTGTTTCTGATGCTGTGCAAGCTCGAGTTCCACGCCTGCCAATGGCAGCACTACCACA
GATCTGGCGAAGCCGCTGGAACCCCACTTTGGAGGCCTACCAGAAACGTGGCCATGATGGTGCCC
GACAGACAGGTGCACTACGACTTCGGCCTGAAGATCCAGAACAAGAACTGCCCCGACGTGCTGCG
GTTCCTGGATCTCAAAGTGCGCTACCTGCACAGCGTGCCCTTCAGAGAGCTGAAAAACCAGAGAA
CAGCCCAGGGCGCTCCTGGAATCCATCATGCTGCTTCTCCAGTGGCCGCCAATCTGTGCGATCCT
GCCAGACATGCCCAGCATACCAGGATTCCTTGTGGCGCTGGACAAGTGCGCGCTGGAAGAGGACC
TGAAGCTGGTGGCGGAGTTCTGCAGCCTCAAAGACCTGCTCCTGAGAAGCCTGGCTGCCCCTGTA
GAAGAGGACAGCCTAGACTGCACACCGTGAAGATGTGGCGGGCCTGCCACTTGTTTCTCCAGCCA
CAAGTGGGCACCCCTCCACCTCATACAGCCTCTGCTAGAGCACCTAGCGGCCCACCTCATCCTCA
CGAATCTTGTCCTGCCGGAAGAAGGCCTGCCAGAGCCGCTCAAACATGTGCCAGACGACAGCACG
GACTGCCCGGATGTGAAGAAGCCGGAACAGCCAGAGTGCCTAGCCTGCACCTTCATCTGCATCAG
GCCGCTCTTGGAGCCGGAAGAGGTAGAGGATGGGGAGAAGCTTGTGCCCAGGTGCCACCTTCTAG
AGGCCACTACAAGCTGATCCAGCAGCCAATCAGCCTGTTCTCCATCACCGACCGGCTGCACAAGA
CATTCAGCCAGCTGCCTTCCGTGCATCTGTGCAGCATCACCTTCCAGTGGGGACACCCTCCTATC
TTTTGCTCCACCAACGACATCTGCGTGACCGCCAACTTCTGTATCAGCGTGACCTTCCTGAAGCC
TTGCTTTCTGCTGCACGAGGCCTCCGCCAGCCAGTTTAAGAAGTTTGACGGCCCCTGCGGCGAGA
GAGGCGGAGGAAGAACTGCAAGAGCCCTTTGGGCCAGAGGCGACTCTGTTCTGACACCAGCTCTG
GACCCTCAGACACCTGTTAGGGCCCCTAGCCTGACAAGAGCTGCCGCTGCTGTTGGAGTGCCTGG
CGATTCTACTAGAAGGGCCGTGCGGCGGATGAACACCTTTTGTGGCGCATCTGCCTGCGACGTGT
CCCTGATCGCTATGGATAGCGCCTGCGAGGAAAGAGGCGCAGCCGGATCTCTGATCTCTTGCGAG
AGCCTGTACCACCGGGAAAAGCAGCTCATTGCCATGGACAGCGCCATCTTCGTGCAGGGCAAAGA
CTGGGGCGTGAAGAAGTTCATCCGGCGGGACTTTACCATGCCTGCCATTCTGAAGCTGCAGAAGA
ATTGTCTTCTAAGCCTGAACAGCAAGATGGCCCTGAATAGCGAGGCCCTGTCTGTGGTGTCCGAG
TATGAGGCTGGAATGACCCTGGGCGAGAAGTTCAGAGTGGGCAACTGCAAGCACCTGAAGATGAC
CCGGCCTACCGAGTACAACCAGAAACTGCAAGTGAACCAGTTCAGCGAGAGCAAGCGGACCGCTC
TGACCCACAACCAGGACTTCAGCATCTACCGGCTGTGCTGCAAGAGGGGCTCTCTGTGTCATGCT
AGCCAGGCTAGAAGCCCCGCCTTTCCTAAGCCTGTCAGACCTCTGCCTGCTCCTATCACCAGAAT
CACCCCTCAGCTCGGCGGCCAGTCTGATTCATCTCAGCCACTGCTGACCACCGGCAGACCTCAAG
GATGGCAAGACCAGGCTCTGAGACACACACAGCAGGCTAGCCCAGCCTCTTGCGCCACCATCACA
ATACCAATACATTCTGCCGCTCTGGGCGATCACAGCGGAGATCCTGGACCTGCCTGGGATACTTG
TCCTCCTCTGCCCCTAACTACACTGATCCCTAGGGCTCCTCCACCTTACGGCGATAGCACAGCCA
GATCCTGGCCTAGCAGATGTGGCCCTCTGGGCTACGCCTACAAGGACTTCCTGTGGTGCTTCCCC
TTCTCTCTGGTGTTCCTGCAAGAAATCCAGATCTGCTGTCACGTGTCCTGCCTGTGCTGTATCTG
CTGTAGCACCCGGATCTGTCTGGGCTGTCTGCTGGAACTGTTCCTGAGCAGAGCCCTGAGAGCAC
TGCACGTGCTGTGGAACGGATTCCAGCTGCACTGCCAGGGCAACACCACACTGCAACAGCTGGGA
GAAGCCTCTCAGGCCCCAAGCGGTTCTCTGATCCCTCTCAGACTGCCCCTCCTGTGGGAAGTGCG
GGGCAATTCTAAGATGGCTCTCAACAGCCTGAACTCCATCGACGACGCCCAGCTGACAAGAATCG
CCCCTCCAAGAAGCCACTGTTGCTTTTGGGAAGTGAACGCCCCTTTTGTGCAGGGTAAAGATTGG
GGCCTCAAAAAGTTTATCAGACGGGACTTCGAGGCTTTCCAGAGAGCAGCTGGCGAAGGCGGACC
TGGCAGAGGTGGTGCTAGAAGAGGTGCTAGAGTGCTGCAGAGCCCATTCTGTAGAGCTGGCGCTG
GCGAATGGCTGGGCCACCAATCTCTTAGATGGGGAATGGAACTGGCCGCTAGCAGGCGGTTTAGC
TGGGATCATCATTCTGCCGGCGGACCTCCAAGAGTGCCAAGCGTTAGAAGCGGAGCAGCCCAGGT
CCAGCCTAAAGATCCACTGCCACTGAGAACACTGGCCGGCTGCCTTGCCAGAACAGCTCATCTTA
GACCTGGCGCCGAAAGCCTGCCTCAACCTCAGCTGCATTGCACAATCGCCAGAGAACTGCACCAG
TTCGCCTTCGACCTGCTGATCAAGAGCCACAAGATGCACTTCTCACTGAAAGAGCACCCGCCACC
GCCGTGCCCACCGCACGTTGTCGGCTATGGCCACCTGGATACAAGCGGCTCCTCTAGCAGTAGCT
CCTGGCCTCAGCCTGACAGCTTTGCTGCCCTGCATAGCTCCCTGAATGAGCTGGGCGAACTGTGG
TTCCAGTCCAGCGAACTGTCTCCTACTGGCGCTCCATGGCCAAGCAGAAGGCCTACTTGGAGAGG
CACCACCGTGTCTCCAAGAACCGCTACAAGCAGCGCCAGAACCTGTTGCGGCACAAAATGGCCCT
CCAGCCAAGAAGCTGCCCTCGGACTTGGAAGCGGACTGCTGAGATTCAGCTGTGGCACAGCCGCC
ATCAGAAGCCATCACCATCACCACCATTAGTAAAGGCGCGCC

[0968] The amino acid sequence of additional five neoantigen layouts for GAd20 expression are shown in SEQ ID NOs: 554, 555, 556, 623 and 624.

SEQ ID NO: 554
MGQKEQIHTLQKNSERMSKQLTRSSQAVQNLQNGGGSRSSATLPGRRRRRWLRRRRQPISVAPAG
PPRRPNQKPNPPGGARCVIMRPTWPGTSAFTKRSFAVTERIILVLGVLSGHSGSRLYEAGMTLGG
KILFFLFLLLPLSPFSLIFTEISCCTLSSEENEYLPRPEWQLQVPFRELKNVSVLEGLRQGRLGG
PCSCHCPRPSQARLTPVDVAGPFLCLGDPGLFPPVKSSITGGKSTCSAPGPQSLPSTPFSTYPQW
VILITELGMECTLGQVGAPSPRREEDGWRGGHSRFKADVPAPQGPCWGGQPGSAPSSAPPEQSLL
DDYWAQKEKGSSSFLRPSCDYWAQKEKISIPRTHLCWKFEMSYTVGGPPPHVHARPRHWKTDRGV
PGDSTRRAVRRMNTFYEAGMTLGEKFRVGNCKHLKMTRPNSKMALNSEALSVVSECGASACDVSL
IAMDSAFVQGKDWGVKKFIRRDFYAYKDFLWCFPFSLVFLQEIQICCHVSCLCCICCSTRICLGC
LLELFLSRALRALHVLWNGFQLHCQTEYNQKLQVNQFSESKSLYHREKQLIAMDSAICEERGAAG
SLISCETMPAILKLQKNCLLSLRTALTHNQDFSIYRLCCKRGSLCHASQARSPAFPKPVRPLPAP
ITRITPQLGGQSDSSQPLLTTGRPQGWQDQALRHTQQASPASCATITIPIHSAALGDHSGDPGPA
WDTCPPLPLTTLIPRAPPPYGDSTARSWPSRCGPLGDGHSYTSKVNCLLLQDGFHGCVSITGAAG
RRNLSIFLFLMLCKLEFHACKIQNKNCPDFKKFDGPCGERGGGRTARALWARGDSVLTPALDPQT
PVRAPSLTRAAAAVHYKLIQQPISLFSITDRLHKTFSQLPSVHLCSITFQWGHPPIFCSTNDICV
TANFCISVTFLKPCFLLHEASASQCHLFLQPQVGTPPPHTASARAPSGPPHPHESCPAGRRPARA
AQTCARRQHGLPGCEEAGTARVPSLHLHLHQAALGAGRGRGWGEACAQVPPSRGVLRFLDLKVRY
LHSQWQHYHRSGEAAGTPLWRPTRNVPFRELKNQRTAQGAPGIHHAASPVAANLCDPARHAQHTR
IPCGAGQVRAGRGPEAGGGVLQPQRPAPEKPGCPCRRGQPRLHTVKMWRAVAMMVPDRQVHYDFG
LGNTTLQQLGEASQAPSGSLIPLRLPLLWEVRGQPDSFAALHSSLNELGEIARELHQFAFDLLIK
SHFVQGKDWGLKKFIRRDFWGMELAASRRFSWDHHSAGGPPRVPSVRSGAAQVQPKDPLPLRTLA
GCLARTAHLRPGAESLPQPQLHCTLWFQSSELSPTGAPWPSRRPTWRGTTVSPRTATSSARTCCG
TKWPSSQEAALGLGSGLLRFSCGTAAIRKMHFSLKEHPPPPCPPEAFQRAAGEGGPGRGGARRGA
RVLQSPFCRAGAGEWLGHQSLRHVVGYGHLDTSGSSSSSSWPNSKMALNSLNSIDDAQLTRIAPP
RSHCCFWEVNAP
SEQ ID NO: 555
MGQKEQIHTLQKNSERMSKQLTRSSQAVQNLQNGGGSRSSATLPGRRRRRWLRRRRQPISVAPAG
PPRRPNQKPNPPGGARCVIMRPTWPGTSAFTKRSFAVTERIITEISCCTLSSEENEYLPRPEWQL
QYEAGMTLGGKILFFLFLLLPLSPFSLIFDYWAQKEKGSSSFLRPSCVPFRELKNVSVLEGLRQG
RLGGPCSCHCPRPSQARLTPVDVAGPFLCLGDPGLFPPVKSSITGGKSTCSAPGPQSLPSTPFST
YPQWVILITELGMECTLGQVGAPSPRREEDGWRGGHSRFKADVPAPQGPCWGGQPGSAPSSAPPE
QSLLDDYWAQKEKISIPRTHLCLVLGVLSGHSGSRLWKFEMSYTVGGPPPHVHARPRHWKTDRDG
HSYTSKVNCLLLQDGFHGCVSITGAAGRRNLSIFLFLMLCKLEFHACKIQNKNCPDFKKFDGPCG
ERGGGRTARALWARGDSVLTPALDPQTPVRAPSLTRAAAAVHYKLIQQPISLFSITDRLHKTFSQ
LPSVHLCSITFQWGHPPIFCSTNDICVTANFCISVTFLKPCFLLHEASASQCHLFLQPQVGTPPP
HTASARAPSGPPHPHESCPAGRRPARAAQTCARRQHGLPGCEEAGTARVPSLHLHLHQAALGAGR
GRGWGEACAQVPPSRGVLRFLDLKVRYLHSQWQHYHRSGEAAGTPLWRPTRNVPFRELKNQRTAQ
GAPGIHHAASPVAANLCDPARHAQHTRIPCGAGQVRAGRGPEAGGGVLQPQRPAPEKPGCPCRRG
QPRLHTVKMWRAVAMMVPDRQVHYDFGLGVPGDSTRRAVRRMNTFYEAGMTLGEKFRVGNCKHLK
MTRPNSKMALNSEALSVVSECGASACDVSLIAMDSAFVQGKDWGVKKFIRRDFYAYKDFLWCFPF
SLVFLQEIQICCHVSCLCCICCSTRICLGCLLELFLSRALRALHVLWNGFQLHCQTEYNQKLQVN
QFSESKSLYHREKQLIAMDSAICEERGAAGSLISCETMPAILKLQKNCLLSLRTALTHNQDFSTY
RLCCKRGSLCHASQARSPAFPKPVRPLPAPITRITPQLGGQSDSSQPLLTTGRPQGWQDQALRHT
QQASPASCATITIPIHSAALGDHSGDPGPAWDTCPPLPLTTLIPRAPPPYGDSTARSWPSRCGPL
GGNTTLQQLGEASQAPSGSLIPLRLPLLWEVRGQPDSFAALHSSLNELGEIARELHQFAFDLLIK
SHFVQGKDWGLKKFIRRDFWGMELAASRRFSWDHHSAGGPPRVPSVRSGAAQVQPKDPLPLRTLA
GCLARTAHLRPGAESLPQPQLHCTLWFQSSELSPTGAPWPSRRPTWRGTTVSPRTATSSARTCCG
TKWPSSQEAALGLGSGLLRFSCGTAAIRKMHFSLKEHPPPPCPPEAFQRAAGEGGPGRGGARRGA
RVLQSPFCRAGAGEWLGHQSLRHVVGYGHLDTSGSSSSSSWPNSKMALNSLNSIDDAQLTRIAPP
RSHCCFWEVNAP
SEQ ID NO: 556
MGQKEQIHTLQKNSERMSKQLTRSSQAVQNLQNGGGSRSSATLPGRRRRRWLRRRRQPISVAPAG
PPRRPNQKPNPPGGARCVIMRPTWPGTSAFTKRSFAVTERIIDYWAQKEKGSSSFLRPSCVPFRE
LKNVSVLEGLRQGRLGGPCSCHCPRPSQARLTPVDVAGPFLCLGDPGLFPPVKSSILVLGVLSGH
SGSRLYEAGMTLGGKILFFLFLLLPLSPFSLIFTEISCCTLSSEENEYLPRPEWQLQTGGKSTCS
APGPQSLPSTPFSTYPQWVILITELGMECTLGQVGAPSPRREEDGWRGGHSRFKADVPAPQGPCW
GGQPGSAPSSAPPEQSLLDDYWAQKEKISIPRTHLCWKFEMSYTVGGPPPHVHARPRHWKTDRDG
HSYTSKVNCLLLQDGFHGCVSITGAAGRRNLSIFLFLMLCKLEFHACKIQNKNCPDFKKFDGPCG
ERGGGRTARALWARGDSVLTPALDPQTPVRAPSLTRAAAAVHYKLIQQPISLFSITDRLHKTFSQ
LPSVHLCSITFQWGHPPIFCSTNDICVTANFCISVTFLKPCFLLHEASASQCHLFLQPQVGTPPP
HTASARAPSGPPHPHESCPAGRRPARAAQTCARRQHGLPGCEEAGTARVPSLHLHLHQAALGAGR
GRGWGEACAQVPPSRGVLRFLDLKVRYLHSQWQHYHRSGEAAGTPLWRPTRNVPFRELKNQRTAQ
GAPGIHHAASPVAANLCDPARHAQHTRIPCGAGQVRAGRGPEAGGGVLQPQRPAPEKPGCPCRRG
QPRLHTVKMWRAVAMMVPDRQVHYDFGLGVPGDSTRRAVRRMNTFYEAGMTLGEKFRVGNCKHLK
MTRPNSKMALNSEALSVVSECGASACDVSLIAMDSAFVQGKDWGVKKFIRRDFYAYKDFLWCFPF
SLVFLQEIQICCHVSCLCCICCSTRICLGCLLELFLSRALRALHVLWNGFQLHCQTEYNQKLQVN
QFSESKSLYHREKQLIAMDSAICEERGAAGSLISCETMPAILKLQKNCLLSLRTALTHNQDFSTY
RLCCKRGSLCHASQARSPAFPKPVRPLPAPITRITPQLGGQSDSSQPLLTTGRPQGWQDQALRHT
QQASPASCATITIPIHSAALGDHSGDPGPAWDTCPPLPLTTLIPRAPPPYGDSTARSWPSRCGPL
GGNTTLQQLGEASQAPSGSLIPLRLPLLWEVRGQPDSFAALHSSLNELGEIARELHQFAFDLLIK
SHFVQGKDWGLKKFIRRDFWGMELAASRRFSWDHHSAGGPPRVPSVRSGAAQVQPKDPLPLRTLA
GCLARTAHLRPGAESLPQPQLHCTLWFQSSELSPTGAPWPSRRPTWRGTTVSPRTATSSARTCCG
TKWPSSQEAALGLGSGLLRFSCGTAAIRKMHFSLKEHPPPPCPPEAFQRAAGEGGPGRGGARRGA
RVLQSPFCRAGAGEWLGHQSLRHVVGYGHLDTSGSSSSSSWPNSKMALNSLNSIDDAQLTRIAPP
RSHCCFWEVNAP
SEQ ID NO: 623
MGQKEQIHTLQKNSERMSKQLTRSSQAVGVPGDSTRRAVRRMNTFYEAGMTLGEKFRVGNCKHLK
MTRPNSKMALNSEALSVVSECGASACDVSLIAMDSAFVQGKDWGVKKFIRRDFYAYKDFLWCFPF
SLVFLQEIQICCHVSCLCCICCSTRICLGCLLELFLSRALRALHVLWNGFQLHCQTEYNQKLQVN
QFSESKSLYHREKQLIAMDSAICEERGAAGSLISCETMPAILKLQKNCLLSLRTALTHNQDFSTY
RLCCKRGSLCHASQARSPAFPKPVRPLPAPITRITPQLGGQSDSSQPLLTTGRPQGWQDQALRHT
QQASPASCATITIPIHSAALGDHSGDPGPAWDTCPPLPLTTLIPRAPPPYGDSTARSWPSRCGPL
GGNTTLQQLGEASQAPSGSLIPLRLPLLWEVRGQPDSFAALHSSLNELGEIARELHQFAFDLLIK
SHFVQGKDWGLKKFIRRDFWGMELAASRRFSWDHHSAGGPPRVPSVRSGAAQVQPKDPLPLRTLA
GCLARTAHLRPGAESLPQPQLHCTLWFQSSELSPTGAPWPSRRPTWRGTTVSPRTATSSARTCCG
TKWPSSQEAALGLGSGLLRFSCGTAAIRKMHFSLKEHPPPPCPPEAFQRAAGEGGPGRGGARRGA
RVLQSPFCRAGAGEWLGHQSLRHVVGYGHLDTSGSSSSSSWPNSKMALNSLNSIDDAQLTRIAPP
RSHCCFWEVNAPDGHSYTSKVNCLLLQDGFHGCVSITGAAGRRNLSIFLFLMLCKLEFHACKIQN
KNCPDFKKFDGPCGERGGGRTARALWARGDSVLTPALDPQTPVRAPSLTRAAAAVHYKLIQQPIS
LFSITDRLHKTFSQLPSVHLCSITFQWGHPPIFCSTNDICVTANFCISVTFLKPCFLLHEASASQ
CHLFLQPQVGTPPPHTASARAPSGPPHPHESCPAGRRPARAAQTCARRQHGLPGCEEAGTARVPS
LHLHLHQAALGAGRGRGWGEACAQVPPSRGVLRFLDLKVRYLHSQWQHYHRSGEAAGTPLWRPTR
NVPFRELKNQRTAQGAPGIHHAASPVAANLCDPARHAQHTRIPCGAGQVRAGRGPEAGGGVLQPQ
RPAPEKPGCPCRRGQPRLHTVKMWRAVAMMVPDRQVHYDFGLQNLQNGGGSRSSATLPGRRRRRW
LRRRRQPISVAPAGPPRRPNQKPNPPGGARCVIMRPTWPGTSAFTKRSFAVTERIILVLGVLSGH
SGSRLYEAGMTLGGKILFFLFLLLPLSPFSLIFTEISCCTLSSEENEYLPRPEWQLQVPFRELKN
VSVLEGLRQGRLGGPCSCHCPRPSQARLTPVDVAGPFLCLGDPGLFPPVKSSITGGKSTCSAPGP
QSLPSTPFSTYPQWVILITELGMECTLGQVGAPSPRREEDGWRGGHSRFKADVPAPQGPCWGGQP
GSAPSSAPPEQSLLDDYWAQKEKGSSSFLRPSCDYWAQKEKISIPRTHLCWKFEMSYTVGGPPPH
VHARPRHWKTDR
SEQ ID NO: 624
MGQKEQIHTLQKNSERMSKQLTRSSQAVGNTTLQQLGEASQAPSGSLIPLRLPLLWEVRGQPDSF
AALHSSLNELGEIARELHQFAFDLLIKSHFVQGKDWGLKKFIRRDFWGMELAASRRFSWDHHSAG
GPPRVPSVRSGAAQVQPKDPLPLRTLAGCLARTAHLRPGAESLPQPQLHCTLWFQSSELSPTGAP
WPSRRPTWRGTTVSPRTATSSARTCCGTKWPSSQEAALGLGSGLLRFSCGTAAIRKMHFSLKEHP
PPPCPPEAFQRAAGEGGPGRGGARRGARVLQSPFCRAGAGEWLGHQSLRHVVGYGHLDTSGSSSS
SSWPNSKMALNSLNSIDDAQLTRIAPPRSHCCFWEVNAPGVPGDSTRRAVRRMNTFYEAGMTLGE
KFRVGNCKHLKMTRPNSKMALNSEALSVVSECGASACDVSLIAMDSAFVQGKDWGVKKFIRRDFY
AYKDFLWCFPFSLVFLQEIQICCHVSCLCCICCSTRICLGCLLELFLSRALRALHVLWNGFQLHC
QTEYNQKLQVNQFSESKSLYHREKQLIAMDSAICEERGAAGSLISCETMPAILKLQKNCLLSLRT
ALTHNQDFSIYRLCCKRGSLCHASQARSPAFPKPVRPLPAPITRITPQLGGQSDSSQPLLTTGRP
QGWQDQALRHTQQASPASCATITIPIHSAALGDHSGDPGPAWDTCPPLPLTTLIPRAPPPYGDST
ARSWPSRCGPLGDGHSYTSKVNCLLLQDGFHGCVSITGAAGRRNLSIFLFLMLCKLEFHACKIQN
KNCPDFKKFDGPCGERGGGRTARALWARGDSVLTPALDPQTPVRAPSLTRAAAAVHYKLIQQPIS
LFSITDRLHKTFSQLPSVHLCSITFQWGHPPIFCSTNDICVTANFCISVTFLKPCFLLHEASASQ
CHLFLQPQVGTPPPHTASARAPSGPPHPHESCPAGRRPARAAQTCARRQHGLPGCEEAGTARVPS
LHLHLHQAALGAGRGRGWGEACAQVPPSRGVLRFLDLKVRYLHSQWQHYHRSGEAAGTPLWRPTR
NVPFRELKNQRTAQGAPGIHHAASPVAANLCDPARHAQHTRIPCGAGQVRAGRGPEAGGGVLQPQ
RPAPEKPGCPCRRGQPRLHTVKMWRAVAMMVPDRQVHYDFGLQNLQNGGGSRSSATLPGRRRRRW
LRRRRQPISVAPAGPPRRPNQKPNPPGGARCVIMRPTWPGTSAFTKRSFAVTERIITEISCCTLS
SEENEYLPRPEWQLQYEAGMTLGGKILFFLFLLLPLSPFSLIFDYWAQKEKGSSSFLRPSCVPFR
ELKNVSVLEGLRQGRLGGPCSCHCPRPSQARLTPVDVAGPFLCLGDPGLFPPVKSSITGGKSTCS
APGPQSLPSTPFSTYPQWVILITELGMECTLGQVGAPSPRREEDGWRGGHSRFKADVPAPQGPCW
GGQPGSAPSSAPPEQSLLDDYWAQKEKISIPRTHLCLVLGVLSGHSGSRLWKFEMSYTVGGPPPH
VHARPRHWKTDR

[0969] The amino acid sequence of additional five neoantigen layouts for MVA expression are shown in SEQ ID NOs: 557, 558, 559, 625 and 626.

SEQ ID NO: 557
MGQKEQIHTLQKNSERMSKQLTRSSQAVQNLQNGGGSRSSATLPGRRRRRWLRRRRQPISVAPAG
PPRRPNQKPNPPGGARCVIMRPTWPGTSAFTGMECTLGQVGAPSPRREEDGWRGGHSRFKADVPA
PQGPCWGGQPGSAPSSAPPEQSLLDDYWAQKEKISIPRTHLCWKFEMSYTVGGPPPHVHARPRHW
KTDRDYWAQKEKGSSSFLRPSCVPFRELKNVSVLEGLRQGRLGGPCSCHCPRPSQARLTPVDVAG
PFLCLGDPGLFPPVKSSITEISCCTLSSEENEYLPRPEWQLQYEAGMTLGGKILFFLFLLLPLSP
FSLIFLVLGVLSGHSGSRLKRSFAVTERIITGGKSTCSAPGPQSLPSTPFSTYPQWVILITELDG
HSYTSKVNCLLLQDGFHGCVSITGAAGRRNLSIFLFLMLCKLEFHACCHLFLQPQVGTPPPHTAS
ARAPSGPPHPHESCPAGRRPARAAQTCARRQHGLPGCEEAGTARVPSLHLHLHQAALGAGRGRGW
GEACAQVPPSRGHYKLIQQPISLFSITDRLHKTFSQLPSVHLCSITFQWGHPPIFCSTNDICVTA
NFCISVTFLKPCFLLHEASASQVAMMVPDRQVHYDFGLKIQNKNCPDVLRFLDLKVRYLHSVPFR
ELKNQRTAQGAPGIHHAASPVAANLCDPARHAQHTRIPCGAGQVRAGRGPEAGGGVLQPQRPAPE
KPGCPCRRGQPRLHTVKMWRAQWQHYHRSGEAAGTPLWRPTRNFKKFDGPCGERGGGRTARALWA
RGDSVLTPALDPQTPVRAPSLTRAAAAVGVPGDSTRRAVRRMNTFCGASACDVSLIAMDSACEER
GAAGSLISCESLYHREKQLIAMDSAIFVQGKDWGVKKFIRRDFTMPAILKLQKNCLLSLNSKMAL
NSEALSVVSEYEAGMTLGEKFRVGNCKHLKMTRPTEYNQKLQVNQFSESKRTALTHNQDFSIYRL
CCKRGSLCHASQARSPAFPKPVRPLPAPITRITPQLGGQSDSSQPLLTTGRPQGWQDQALRHTQQ
ASPASCATITIPIHSAALGDHSGDPGPAWDTCPPLPLTTLIPRAPPPYGDSTARSWPSRCGPLGY
AYKDFLWCFPFSLVFLQEIQICCHVSCLCCICCSTRICLGCLLELFLSRALRALHVLWNGFQLHC
QGNTTLQQLGEASQAPSGSLIPLRLPLLWEVRGNSKMALNSLNSIDDAQLTRIAPPRSHCCFWEV
NAPFVQGKDWGLKKFIRRDFEAFQRAAGEGGPGRGGARRGARVLQSPFCRAGAGEWLGHQSLRWG
MELAASRRFSWDHHSAGGPPRVPSVRSGAAQVQPKDPLPLRTLAGCLARTAHLRPGAESLPQPQL
HCTIARELHQFAFDLLIKSHKMHFSLKEHPPPPCPPHVVGYGHLDTSGSSSSSSWPQPDSFAALH
SSLNELGELWFQSSELSPTGAPWPSRRPTWRGTTVSPRTATSSARTCCGTKWPSSQEAALGLGSG
LLRFSCGTAAIR
SEQ ID NO: 558
MGQKEQIHTLQKNSERMSKQLTRSSQAVDGHSYTSKVNCLLLQDGFHGCVSITGAAGRRNLSIFL
FLMLCKLEFHACQWQHYHRSGEAAGTPLWRPTRNVAMMVPDRQVHYDFGLVLRFLDLKVRYLHSK
IQNKNCPDVPFRELKNQRTAQGAPGIHHAASPVAANLCDPARHAQHTRIPCGAGQVRAGRGPEAG
GGVLQPQRPAPEKPGCPCRRGQPRLHTVKMWRACHLFLQPQVGTPPPHTASARAPSGPPHPHESC
PAGRRPARAAQTCARRQHGLPGCEEAGTARVPSLHLHLHQAALGAGRGRGWGEACAQVPPSRGHY
KLIQQPISLFSITDRLHKTFSQLPSVHLCSITFQWGHPPIFCSTNDICVTANFCISVTFLKPCFL
LHEASASQFKKFDGPCGERGGGRTARALWARGDSVLTPALDPQTPVRAPSLTRAAAAVQNLQNGG
GSRSSATLPGRRRRRWLRRRRQPISVAPAGPPRRPNQKPNPPGGARCVIMRPTWPGTSAFTGMEC
TLGQVGAPSPRREEDGWRGGHSRFKADVPAPQGPCWGGQPGSAPSSAPPEQSLLDDYWAQKEKIS
IPRTHLCWKFEMSYTVGGPPPHVHARPRHWKTDRDYWAQKEKGSSSFLRPSCVPFRELKNVSVLE
GLRQGRLGGPCSCHCPRPSQARLTPVDVAGPFLCLGDPGLFPPVKSSITEISCCTLSSEENEYLP
RPEWQLQYEAGMTLGGKILFFLFLLLPLSPFSLIFLVLGVLSGHSGSRLKRSFAVTERIITGGKS
TCSAPGPQSLPSTPFSTYPQWVILITELGVPGDSTRRAVRRMNTFCGASACDVSLIAMDSACEER
GAAGSLISCESLYHREKQLIAMDSAIFVQGKDWGVKKFIRRDFTMPAILKLQKNCLLSLNSKMAL
NSEALSVVSEYEAGMTLGEKFRVGNCKHLKMTRPTEYNQKLQVNQFSESKRTALTHNQDFSIYRL
CCKRGSLCHASQARSPAFPKPVRPLPAPITRITPQLGGQSDSSQPLLTTGRPQGWQDQALRHTQQ
ASPASCATITIPIHSAALGDHSGDPGPAWDTCPPLPLTTLIPRAPPPYGDSTARSWPSRCGPLGY
AYKDFLWCFPFSLVFLQEIQICCHVSCLCCICCSTRICLGCLLELFLSRALRALHVLWNGFQLHC
QGNTTLQQLGEASQAPSGSLIPLRLPLLWEVRGNSKMALNSLNSIDDAQLTRIAPPRSHCCFWEV
NAPFVQGKDWGLKKFIRRDFEAFQRAAGEGGPGRGGARRGARVLQSPFCRAGAGEWLGHQSLRWG
MELAASRRFSWDHHSAGGPPRVPSVRSGAAQVQPKDPLPLRTLAGCLARTAHLRPGAESLPQPQL
HCTIARELHQFAFDLLIKSHKMHFSLKEHPPPPCPPHVVGYGHLDTSGSSSSSSWPQPDSFAALH
SSLNELGELWFQSSELSPTGAPWPSRRPTWRGTTVSPRTATSSARTCCGTKWPSSQEAALGLGSG
LLRFSCGTAAIR
SEQ ID NO: 559
MGQKEQIHTLQKNSERMSKQLTRSSQAVGNTTLQQLGEASQAPSGSLIPLRLPLLWEVRGNSKMA
LNSLNSIDDAQLTRIAPPRSHCCFWEVNAPFVQGKDWGLKKFIRRDFEAFQRAAGEGGPGRGGAR
RGARVLQSPFCRAGAGEWLGHQSLRWGMELAASRRFSWDHHSAGGPPRVPSVRSGAAQVQPKDPL
PLRTLAGCLARTAHLRPGAESLPQPQLHCTIARELHQFAFDLLIKSHKMHFSLKEHPPPPCPPHV
VGYGHLDTSGSSSSSSWPQPDSFAALHSSLNELGELWFQSSELSPTGAPWPSRRPTWRGTTVSPR
TATSSARTCCGTKWPSSQEAALGLGSGLLRFSCGTAAIRDGHSYTSKVNCLLLQDGFHGCVSITG
AAGRRNLSIFLFLMLCKLEFHACQWQHYHRSGEAAGTPLWRPTRNVAMMVPDRQVHYDFGLKIQN
KNCPDVLRFLDLKVRYLHSVPFRELKNQRTAQGAPGIHHAASPVAANLCDPARHAQHTRIPCGAG
QVRAGRGPEAGGGVLQPQRPAPEKPGCPCRRGQPRLHTVKMWRACHLFLQPQVGTPPPHTASARA
PSGPPHPHESCPAGRRPARAAQTCARRQHGLPGCEEAGTARVPSLHLHLHQAALGAGRGRGWGEA
CAQVPPSRGHYKLIQQPISLFSITDRLHKTFSQLPSVHLCSITFQWGHPPIFCSTNDICVTANFC
ISVTFLKPCFLLHEASASQFKKFDGPCGERGGGRTARALWARGDSVLTPALDPQTPVRAPSLTRA
AAAVGVPGDSTRRAVRRMNTFCGASACDVSLIAMDSATEYNQKLQVNQFSESKYEAGMTLGEKFR
VGNCKHLKMTRPTMPAILKLQKNCLLSLNSKMALNSEALSVVSECEERGAAGSLISCESLYHREK
QLIAMDSAIFVQGKDWGVKKFIRRDFRTALTHNQDFSIYRLCCKRGSLCHASQARSPAFPKPVRP
LPAPITRITPQLGGQSDSSQPLLTTGRPQGWQDQALRHTQQASPASCATITIPIHSAALGDHSGD
PGPAWDTCPPLPLTTLIPRAPPPYGDSTARSWPSRCGPLGYAYKDFLWCFPFSLVFLQEIQICCH
VSCLCCICCSTRICLGCLLELFLSRALRALHVLWNGFQLHCQQNLQNGGGSRSSATLPGRRRRRW
LRRRRQPISVAPAGPPRRPNQKPNPPGGARCVIMRPTWPGTSAFTGMECTLGQVGAPSPRREEDG
WRGGHSRFKADVPAPQGPCWGGQPGSAPSSAPPEQSLLDDYWAQKEKISIPRTHLCWKFEMSYTV
GGPPPHVHARPRHWKTDRDYWAQKEKGSSSFLRPSCVPFRELKNVSVLEGLRQGRLGGPCSCHCP
RPSQARLTPVDVAGPFLCLGDPGLFPPVKSSITEISCCTLSSEENEYLPRPEWQLQYEAGMTLGG
KILFFLFLLLPLSPFSLIFLVLGVLSGHSGSRLKRSFAVTERIITGGKSTCSAPGPQSLPSTPFS
TYPQWVILITEL
SEQ ID NO: 625
MGQKEQIHTLQKNSERMSKQLTRSSQAVGNTTLQQLGEASQAPSGSLIPLRLPLLWEVRGNSKMA
LNSLNSIDDAQLTRIAPPRSHCCFWEVNAPFVQGKDWGLKKFIRRDFEAFQRAAGEGGPGRGGAR
RGARVLQSPFCRAGAGEWLGHQSLRWGMELAASRRFSWDHHSAGGPPRVPSVRSGAAQVQPKDPL
PLRTLAGCLARTAHLRPGAESLPQPQLHCTIARELHQFAFDLLIKSHKMHFSLKEHPPPPCPPHV
VGYGHLDTSGSSSSSSWPQPDSFAALHSSLNELGELWFQSSELSPTGAPWPSRRPTWRGTTVSPR
TATSSARTCCGTKWPSSQEAALGLGSGLLRFSCGTAAIRQNLQNGGGSRSSATLPGRRRRRWLRR
RRQPISVAPAGPPRRPNQKPNPPGGARCVIMRPTWPGTSAFTGMECTLGQVGAPSPRREEDGWRG
GHSRFKADVPAPQGPCWGGQPGSAPSSAPPEQSLLDDYWAQKEKISIPRTHLCWKFEMSYTVGGP
PPHVHARPRHWKTDRDYWAQKEKGSSSFLRPSCVPFRELKNVSVLEGLRQGRLGGPCSCHCPRPS
QARLTPVDVAGPFLCLGDPGLFPPVKSSITEISCCTLSSEENEYLPRPEWQLQYEAGMTLGGKIL
FFLFLLLPLSPFSLIFLVLGVLSGHSGSRLKRSFAVTERIITGGKSTCSAPGPQSLPSTPFSTYP
QWVILITELDGHSYTSKVNCLLLQDGFHGCVSITGAAGRRNLSIFLFLMLCKLEFHACQWQHYHR
SGEAAGTPLWRPTRNVAMMVPDRQVHYDFGLVLRFLDLKVRYLHSKIQNKNCPDVPFRELKNQRT
AQGAPGIHHAASPVAANLCDPARHAQHTRIPCGAGQVRAGRGPEAGGGVLQPQRPAPEKPGCPCR
RGQPRLHTVKMWRACHLFLQPQVGTPPPHTASARAPSGPPHPHESCPAGRRPARAAQTCARRQHG
LPGCEEAGTARVPSLHLHLHQAALGAGRGRGWGEACAQVPPSRGHYKLIQQPISLFSITDRLHKT
FSQLPSVHLCSITFQWGHPPIFCSTNDICVTANFCISVTFLKPCFLLHEASASQFKKFDGPCGER
GGGRTARALWARGDSVLTPALDPQTPVRAPSLTRAAAAVGVPGDSTRRAVRRMNTFCGASACDVS
LIAMDSACEERGAAGSLISCESLYHREKQLIAMDSAIFVQGKDWGVKKFIRRDFTMPAILKLQKN
CLLSLNSKMALNSEALSVVSEYEAGMTLGEKFRVGNCKHLKMTRPTEYNQKLQVNQFSESKRTAL
THNQDFSTYRLCCKRGSLCHASQARSPAFPKPVRPLPAPITRITPQLGGQSDSSQPLLTTGRPQG
WQDQALRHTQQASPASCATITIPIHSAALGDHSGDPGPAWDTCPPLPLTTLIPRAPPPYGDSTAR
SWPSRCGPLGYAYKDFLWCFPFSLVFLQEIQICCHVSCLCCICCSTRICLGCLLELFLSRALRAL
HVLWNGFQLHCQ
SEQ ID NO: 626
MGQKEQIHTLQKNSERMSKQLTRSSQAVDGHSYTSKVNCLLLQDGFHGCVSITGAAGRRNLSIFL
FLMLCKLEFHACVPFRELKNQRTAQGAPGIHHAASPVAANLCDPARHAQHTRIPCGAGQVRAGRG
PEAGGGVLQPQRPAPEKPGCPCRRGQPRLHTVKMWRAQWQHYHRSGEAAGTPLWRPTRNKIQNKN
CPDVAMMVPDRQVHYDFGLVLRFLDLKVRYLHSCHLFLQPQVGTPPPHTASARAPSGPPHPHESC
PAGRRPARAAQTCARRQHGLPGCEEAGTARVPSLHLHLHQAALGAGRGRGWGEACAQVPPSRGHY
KLIQQPISLFSITDRLHKTFSQLPSVHLCSITFQWGHPPIFCSTNDICVTANFCISVTFLKPCFL
LHEASASQFKKFDGPCGERGGGRTARALWARGDSVLTPALDPQTPVRAPSLTRAAAAVQNLQNGG
GSRSSATLPGRRRRRWLRRRRQPISVAPAGPPRRPNQKPNPPGGARCVIMRPTWPGTSAFTGMEC
TLGQVGAPSPRREEDGWRGGHSRFKADVPAPQGPCWGGQPGSAPSSAPPEQSLLDDYWAQKEKIS
IPRTHLCWKFEMSYTVGGPPPHVHARPRHWKTDRDYWAQKEKGSSSFLRPSCVPFRELKNVSVLE
GLRQGRLGGPCSCHCPRPSQARLTPVDVAGPFLCLGDPGLFPPVKSSITEISCCTLSSEENEYLP
RPEWQLQYEAGMTLGGKILFFLFLLLPLSPFSLIFLVLGVLSGHSGSRLKRSFAVTERIITGGKS
TCSAPGPQSLPSTPFSTYPQWVILITELGNTTLQQLGEASQAPSGSLIPLRLPLLWEVRGNSKMA
LNSLNSIDDAQLTRIAPPRSHCCFWEVNAPFVQGKDWGLKKFIRRDFEAFQRAAGEGGPGRGGAR
RGARVLQSPFCRAGAGEWLGHQSLRWGMELAASRRFSWDHHSAGGPPRVPSVRSGAAQVQPKDPL
PLRTLAGCLARTAHLRPGAESLPQPQLHCTIARELHQFAFDLLIKSHKMHFSLKEHPPPPCPPHV
VGYGHLDTSGSSSSSSWPQPDSFAALHSSLNELGELWFQSSELSPTGAPWPSRRPTWRGTTVSPR
TATSSARTCCGTKWPSSQEAALGLGSGLLRFSCGTAAIRGVPGDSTRRAVRRMNTFCGASACDVS
LIAMDSACEERGAAGSLISCESLYHREKQLIAMDSAIFVQGKDWGVKKFIRRDFYEAGMTLGEKF
RVGNCKHLKMTRPTMPAILKLQKNCLLSLNSKMALNSEALSVVSETEYNQKLQVNQFSESKRTAL
THNQDFSIYRLCCKRGSLCHASQARSPAFPKPVRPLPAPITRITPQLGGQSDSSQPLLTTGRPQG
WQDQALRHTQQASPASCATITIPIHSAALGDHSGDPGPAWDTCPPLPLTTLIPRAPPPYGDSTAR
SWPSRCGPLGYAYKDFLWCFPFSLVFLQEIQICCHVSCLCCICCSTRICLGCLLELFLSRALRAL
HVLWNGFQLHCQ
The polynucleotide sequence of the full GAd20 incorporating
the GAd20 expression cassette
SEQ ID NO: 713
catcatcaataatataccttattttggattgaggccaatatgataatgaggtgggcggggcgagg
cggggcgggtgacgtaggacgcgcgagtagggttgggaggtgtggcggaagtgtggcatttgcaa
gtgggaggagctgacatgcaatcttccgtcgcggaaaatgtgacgtttttgatgagcgccgccta
cctccggaagtgccaattttcgcgcgcttttcaccggatatcgtagtaattttgggcgggaccat
gtaagatttggccattttcgcgcgaaaagtgaaacggggaagtgaaaactgaataatagggcgtt
agtcatagcgcgtaatatttaccgagggccgagggactttgaccgattacgtggaggactcgccc
aggtgttttttacgtgaatttccgcgttccgggtcaaagtctccgtttttattgtcgccgtcatc
tgacgggccgccattgcatacgttgtatccatatcataatatgtacatttatattggctcatgtc
caacattaccgccatgttgacattgattattgactagttattaatagtaatcaattacggggtca
ttagttcatagcccatatatggagttccgcgttacataacttacggtaaatggcccgcctggctg
accgcccaacgacccccgcccattgacgtcaataatgacgtatgttcccatagtaacgccaatag
ggactttccattgacgtcaatgggtggagtatttacggtaaactgcccacttggcagtacatcaa
gtgtatcatatgccaagtacgccccctattgacgtcaatgacggtaaatggcccgcctggcatta
tgcccagtacatgaccttatgggactttcctacttggcagtacatctacgtattagtcatcgcta
ttaccatggtgatgcggttttggcagtacatcaatgggcgtggatagcggtttgactcacgggga
tttccaagtctccaccccattgacgtcaatgggagtttgttttggcaccaaaatcaacgggactt
tccaaaatgtcgtaacaactccgccccattgacgcaaatgggcggtaggcgtgtacggtgggagg
tctatataagcagagctctccctatcagtgatagagatctccctatcagtgatagagatcgtcga
cgagctcgtttagtgaaccgtcagatcgcctggagacgccatccacgctgttttgacctccatag
aagacaccgggaccgatccagcctccgcggccgggaacggtgcattggaacgcggattccccgtg
ccaagagtgagatcttccgtttatctaggtaccagatatcagaattcggatcccgcgacttcgcc
gccatgggccagaaagagcagatccacacactgcagaaaaacagcgagcggatgagcaagcagct
gaccagatcttctcaggccgtgcagaacctgcagaacggcggaggctctagaagctctgctacac
ttcctggcaggcggcggagaagatggctgagaagaaggcggcagcctatctctgtggctcctgct
ggacctcctagacggcccaaccagaagcctaatcctcctggcggagccagatgcgtgatcatgag
gcctacatggcctggcaccagcgccttcaccaagagaagctttgccgtgaccgagcggatcatcg
actattgggctcaaaaagagaagggcagcagcagcttcctgcggcctagctgtgattattgggcc
cagaaagaaaagatcagcatccccagaacacacctgtgcctggtgctgggagtgctgtctggaca
ctctggcagcagactgtatgaggccggcatgacactcggcggcaagatcctgttcttcctgttcc
tgctgctccctctgagccccttcagcctgatcttcaccgagatcagctgctgcaccctgagcagc
gaggaaaacgagtacctgcctagacctgagtggcagctgcaggtccccttcagagagctgaagaa
cgtttccgtgctggaaggcctgagacagggcagacttggcggcccttgtagctgtcactgcccca
gacctagtcaggccagactgacacctgtggatgtggccggacctttcctgtgtctgggagatcct
ggcctgtttccacctgtgaagtccagcatcacaggcggcaagtccacatgttctgcccctggacc
tcagagcctgcctagcacacccttcagcacataccctcagtgggtcatcctgatcaccgaactcg
gcatggaatgcaccctgggacaagtgggagccccatctcctagaagagaagaggatggctggcgc
ggaggccactctagattcaaagctgatgtgcccgctcctcagggcccttgttggggaggacaacc
tggatctgccccatcttctgccccacctgaacagtccctgctggattggaagttcgagatgagct
acaccgtcggcggacctccacctcatgttcatgccagacctcggcactggaaaaccgacagagat
ggccacagctacaccagcaaagtgaactgcctcctgctgcaggatggcttccacggctgtgtgtc
tattactggcgccgctggcagacggaacctgagcatctttctgtttctgatgctgtgcaagctcg
agttccacgcctgcaagatccagaacaagaactgccccgacttcaagaagttcgacggcccttgc
ggagaaagaggcggaggcagaacagctagagccctttgggctagaggcgacagcgttctgacacc
agctctggaccctcagacacctgttagggcccctagcctgacaagagctgccgccgctgtgcact
acaagctgatccagcagccaatcagcctgttcagcatcaccgaccggctgcacaagacattcagc
cagctgccaagcgtgcacctgtgctccatcaccttccagtggggacaccctcctatcttttgctc
caccaacgacatctgcgtgaccgccaacttctgtatcagcgtgaccttcctgaagccttgctttc
tgctgcacgaggccagcgcctctcagtgccacttgtttctgcagccccaagtgggcacacctcct
ccacatacagcctctgctagagcacctagcggccctccacatcctcacgaatcttgtcctgccgg
aagaaggcctgccagagccgctcaaacatgtgccagacgacagcacggactgcctggatgtgaag
aggctggaacagccagagtgcctagcctgcacctccatctgcatcaggctgctcttggagccgga
agaggtagaggatggggcgaagcttgtgctcaggtgccaccttctagaggcgtgctgagattcct
ggacctgaaagtgcgctacctgcacagccagtggcagcactatcacagatctggcgaagccgccg
gaacacccctttggaggccaacaagaaacgtgcccttccgggaactgaagaaccagagaacagct
cagggcgctcctggaatccaccatgctgcttctccagtggccgccaacctgtgtgatcctgccag
acatgcccagcacaccaggattccttgtggcgctggacaagtgcgcgctggaagaggacctgaag
caggcggaggtgttctgcaacctcaaagacccgctcctgagaagcctggctgcccttgcagaaga
ggacagcctagactgcacaccgtgaaaatgtggcgagccgtggccatgatggtgcccgatagaca
ggtccactacgactttggactgggcgtgccaggcgatagcactcggagagccgtcagacggatga
acaccttttacgaagccgggatgaccctgggcgagaagttcagagtgggcaactgcaagcacctg
aagatgacccggcctaacagcaagatggccctgaatagcgaggccctgtctgtggtgtctgaatg
tggcgcctctgcctgtgacgtgtccctgatcgctatggactccgcctttgtgcagggcaaagact
ggggcgtgaagaagttcatccggcgggacttctacgcctacaaggacttcctgtggtgcttcccc
ttctctctggtgttcctgcaagagatccagatctgctgtcatgtgtcctgcctgtgctgcatctg
ctgtagcaccagaatctgcctgggctgtctgctggaactgttcctgagcagagccctgagagcac
tgcacgtgctgtggaacggattccagctgcactgccagaccgagtacaaccagaaactgcaagtg
aaccagttcagcgagagcaagagcctgtaccaccgggaaaagcagctcattgccatggacagcgc
catctgcgaagagagaggcgccgcaggatctctgatctcctgcgaaacaatgcccgccatcctga
agctgcagaagaattgcctcctaagcctgcgaaccgctctgacacacaaccaggacttcagcatc
tacagactgtgttgcaagcggggctccctgtgccatgcaagccaagctagaagccccgcctttcc
taaacctgtgcgacctctgccagctccaatcaccagaattacccctcagctcggcggccagagcg
attcatctcaacctctgctgaccaccggcagacctcaaggctggcaagaccaagctctgagacac
acccagcaggctagccctgcctcttgtgccaccatcacaatccccatccactctgccgctctggg
cgatcattctggcgatcctggaccagcctgggacacatgtcctccactgccactcacaacactga
tccctagggctcctccaccttacggcgattctaccgctagaagctggcccagcagatgtggacca
ctcggaggcaacacaaccctccagcaactgggagaagcctctcaggctcctagcggctctctgat
ccctctcagactgcctctcctgtgggaagttcggggccagcctgattcttttgccgcactgcaca
gctccctgaacgagctgggagagatcgctagagagctgcaccagttcgccttcgacctgctgatc
aagagccacttcgtgcaaggcaaggattggggcctcaaaaagtttatccgcagagacttctgggg
catggaactggccgccagcagaagattcagctgggatcatcatagcgcaggcggcccacctagag
tgccatctgttagaagcggagctgcccaggtgcagcctaaagatcctctgccactgagaacactg
gccggctgccttgctagaacagcccatcttagacctggcgccgagtctctgcctcagccacaact
gcactgtaccctgtggttccagtccagcgagctgtctcctactggtgccccttggccatctagac
gccctacttggagaggcaccaccgtgtcaccaagaaccgccacaagcagcgccagaacctgttgt
ggcacaaagtggccctccagccaagaagccgctctcggacttggaagcggactgctgaggttctc
ttgtggaaccgccgccattcggaagatgcactttagcctgaaagaacaccctccaccaccttgtc
ctccagaggctttccaaagagctgctggcgaaggcggacctggtagaggtggtgctagaagaggt
gctagggtgctgcagagcccattctgtagagcaggcgcaggcgaatggctgggccatcagagtct
gagacatgtcgtcggctacggccacctggatacaagcggaagcagctctagctccagctggccta
actcaaaaatggctctgaacagcctgaactccatcgacgacgcccagctgacaagaatcgcccct
cctagatctcactgctgcttttgggaagtgaacgccccaagccatcaccatcaccaccattagta
aaggcgcgcctagcggccgcgatctgctgtgccttctagttgccagccatctgttgtttgcccct
cccccgtgccttccttgaccctggaaggtgccactcccactgtcctttcctaataaaatgaggaa
attgcatcgcattgtctgagtaggtgtcattctattctggggggtggggtggggcaggacagcaa
gggggaggattgggaagacaatagcaggcatgctggggatgcggtgggctctatggccgggccgc
gatcgcgcttaggcctgaccatctggtgctggcctgcaccagggccgagtttgggtctagcgatg
aggataccgattgaggtgggtaaggtgggcgtggctagcagggtgggcgtgtataaattgggggt
ctaaggggtctctctgtttgtcttgcaacagccgccgccatgagcgacaccggcaacagctttga
tggaagcatctttagtccctatctgacagtgcgcatgcctcactgggccggagtgcgtcagaatg
tgatgggttccaacgtggatggacgtcccgttctgccttcaaattcgtctactatggcctacgcg
accgtgggaggaactccgctggacgccgcgacctccgccgccgcctccgccgccgccgcgaccgc
gcgcagcatggctacggacctttacagctctttggtggcgagcagcgcggcctctcgcgcgtctg
ctcgggatgagaaactgactgctctgctgcttaaactggaagacttgacccgggagctgggtcaa
ctgacccagcaggtttccagcttgcgtgagagcagccttgcctccccctaatggcccataatata
aataaaagccagtctgtttggattaagcaagtgtatgttctttatttaactctccgcgcgcggta
agcccgggaccagcggtctcggtcgtttagggtgcggtggattttttccaacacgtggtacaggt
ggctctggatgtttagatacatgggcatgagtccatccctggggtggaggtagcaccactgcaga
gcttcgtgctcgggggtggtgttgtatatgatccagtcgtagcaggagcgctgggcgtggtgctg
aaaaatgtccttaagcaagaggcttatagctagggggaggcccttggtgtaagtgtttacaaatc
tgcttagctgggaggggtgcatccggggggatatgatgtgcatcttggactggatttttaggttg
gctatgttcccgcccagatcccttctgggattcatgttgtgcaggaccaccagcacggtatatcc
agtgcacttgggaaatttatcgtggagcttagacgggaatgcatggaagaacttggagacgccct
tgtggcctcccagattttccatacattcgtccatgatgatggcaatgggcccgtgggaagctgcc
tgagcaaaaacgtttctggcatcgctcacatcgtagttatgttccagggtgaggtcatcatagga
catctttacgaatcgggggcgaagggtcccggactgggggatgatggtaccctcgggccccgggg
cgtagttcccctcacagatctgcatctcccaggctttcatttcagagggagggatcatatccacc
tgcggggcgatgaaaaagacagtttctggcgcaggggagattaactgggatgagagcaggtttct
gagcagctgtgactttccacagccggtgggcccatatatcacgcctatcaccggctgcagctggt
agttaagagagctgcagctgccgtcctcccggagcaggggggccacctcgttgagcatatccctg
acgtggatgttctccctgaccagttccgccagaaggcgctcgccgcccagcgaaagcagctcttg
caaggaagcaaaatttttcagcggtttcaggccatcggccgtgggcatgtttttcagcgtctggg
tcagcagctccagcctgtcccagagctcggtgatgtgctctacggcatctcgatccagcagatct
cctcgtttcgcgggttggggcggctttcgctgtagggcaccagccgatgggcgtccagcggggcc
agagtcatgtccttccatgggcgcagggtcctcgtcagggtggtctgggtcacggtgaaggggtg
cgctccgggttgggcactggccagggtgcgcttgaggctggttctgctggtgctgaatcgctgcc
gctcttcgccctgcgcgtcggccaggtagcatttgaccatggtctcgtagtcgagaccctcggcg
gcgtgccccttggcgcggagctttcccttggaggtggcgccgcacgaggggcactgcaggctctt
cagggcgtagagcttgggagcgagaaacacggactctggggagtaggcgtccgcgccgcaggccg
agcagaccgtctcgcattccaccagccaagtgagttccgggcggtcagggtcaaaaaccaggttg
cccccatgctttttgatgcgtttcttaccttggctctccatgaggcggtgtcccttctcggtgac
gaagaggctgtccgtgtccccgtagaccgacttcaggggcctgtcttccagcggagtgcctctgt
cctcctcgtagagaaactctgaccactctgagacgaaggcccgcgtccaggccaggacgaaggag
gccacgtgggaggggtagcggtcgttgtccactagcgggtccaccttctccagggtgtgcaggca
catgtccccctcctccgcgtccagaaaagtgattggcttgtaggtgtaggacacgtgaccggggg
ttcccaacgggggggtataaaagggggtgggtgccctttcatcttcactctcttccgcatcgctg
tctgcgagagccagctgctggggtaagtattccctctcgaaggcgggcatgacctcagcgctcag
gttgtcagtttctaaaaatgaggaggatttgatgttcacctgtccggaggtgatacctttgaggg
tacctgggtccatctggtcagaaaacactatttttttgttatcaagcttggtggcgaatgacccg
tagagggcgttggagagcagcttggcgatggagcgcagggtctggtttttgtcgcggtcggctcg
ctccttggccgcgatgttgagttgcacgtactcgcgggccacgcacttccactcggggaacacgg
tggtgcgctcgtctgggatcaggcgcaccctccagccgcggttgtgcagggtgaccatgtcgacg
ctggtggcgacctcaccgcgcagacgctcgttggtccagcagaggcggccgcccttgcgcgagca
gaaggggggtagggggtccagctggtcctcgtttggggggtccgcgtcgatggtaaagaccccgg
ggagcaggcgcgggtcaaagtagtcgatcttgcaagcttgcatgtccagagcccgctgccattcg
cgggcggcgagcgcgcgctcgtaggggttgaggggcgggccccagggcatggggtgggtgagcgc
ggaggcgtacatgccgcagatgtcatacacgtacaggggttccctgaggataccgaggtaggtgg
ggtagcagcgccccccgcggatgctggcgcgcacgtagtcatagagctcgtgggagggggccagc
atgttgggcccgaggttggtgcgctgggggcgctcggcgcggaagacgatctgcctgaagatggc
gtgggagttggaggagatggtgggccgctggaagacgttgaagcttgcttcttgcaagcccacgg
agtccctgacgaaggaggcgtaggactcgcgcagcttgtgcaccagctcggcggtgacctggacg
tcgagcgcacagtagtcgagggtctcgcggatgatgtcatacctatcctcccccttctttttcca
cagctcgcggttgaggacgaactcttcgcggtctttccagtactcttggaggggaaacccgtccg
tgtccgaacggtaagagcctagcatgtagaactggttgacggcctggtaggggcagcagcccttc
tccacgggcagcgcgtaggcctgcgccgccttgcggagggaggtgtgggtgagggcgaaagtgtc
cctgaccatgactttgaggtattgatgtctgaagtctgtgtcatcgcagccgccctgttcccaca
gggtgtagtccgtgcgctttttggagcgcgggttgggcagggagaaggtgaggtcattgaagagg
atcttccccgctcgaggcatgaagtttctggtgatgcgaaagggccctgggaccgaggagcggtt
gttgatgacctgggcggccaggacgatctcgtcaaagccgtttatgttgtgtcccacgatgtaga
gctccaggaagcggggctggcccttgatggaggggagctttttaagttcctcgtaggtaagctcc
tcgggcgattccaggccgtgctcctccagggcccagtcttgcaagtgagggttggccgccaggaa
ggatcgccagaggtcgcgggccatgagggtctgcaggcggtcgcggaaggttctgaactgccgcc
ccacggccattttttcgggggtgatgcagtagaaggtgagggggtctttctcccaggggtcccat
ctgagctctcgggcgaggtcgcgcgcggcagcgaccagagcctcgtcgccccccagtttcatgac
cagcatgaagggcacgagttgcttgccaaaggctcccatccaagtgtaggtttctacatcgtagg
tgacaaagaggcgctccgtgcgaggatgagagccgattgggaagaactggatctcccgccaccag
ttggaggattggctgttgatgtggtgaaagtagaagtcccgtctgcgggccgagcactcgtgctg
gcttttgtaaaagcgaccgcagtactggcagcgctgcacgggttgtatatcttgcacgaggtgaa
cctggcgacctctgacgaggaagcgcagcgggaatctaagtcccccgcctggggtcccgtgtggc
tggtggtcttttactttggttgtctggccgccagcatctgtctcctggagggcgatggtggaaca
gaccaccacgccgcgagagccgcaggtccagatctcggcgctcggcgggcggagtttgatgacga
catcgcgcacattggagctgtccatggtctccagctcccgcggcggcaggtcagccgggagttcc
ctggaggttcacctcgcagagacgggtcaaggcgcggacagtgttgagatggtatctgatttcaa
ggggcatgttggaggcggagtcgatggcttgcaggaggccgcagccccggggggccacgatggtt
ccccgcggggcgcgaggggaggcggaagctgggggtgtgttcagaagcggtgacgcgggcgggcc
cccggaggtagggggggttccggccccacaggcatgggcggcaggggcacgtcttcgccgcgcgc
gggcaggggctggtgctggctccgaagagcgcttgcgtgcgcgacgacgcgacggttggtgttcc
tgtatctggcgcctctgagtgaagaccacgggtcccgtgaccttgaacctgaaagagagttcgac
agaatcaatctcggcatcgttgacagcggcctggcgcaggatctcctgcacgtcgcccgagttgt
cctggtaggcgatttctgccatgaactgctcgatctcttcctcctggagatctcctcgtccggcg
cgctccacggtggccgccaggtcgttggagatgcgacccatgagctgcgagaaggcgttgagtcc
gccctcgttccagacccggctgtagaccacgcccccctcggcgtcgcgggcgcgcatgaccacct
gggccaggttgagctccacgtgtcgcgtgaagacggcgtagttgcgcaggcgctggaaaaggtag
ttcagggtggtggcggtgtgctcggcgacgaagaagtacatgacccagcgccgcaacgtggattc
attgatgtcccccaaggcctccaggcgctccatggcctcgtagaagtccacggcgaagttgaaaa
actgggagttgcgagcggacacggtcaactcctcctccagaagaacggatgagctcggcgacagt
gtcgcgcacctcgcgctcgaaggccacggggggcgcttcttcctcttccacctcttcttccatga
ttgcttcttcttcttcctcagccgggacgggagggggcggcggcgggggaggggcgcggcggcgg
cggcggcgcaccgggaggcggtcgatgaagcgctcgatcatctccccccgcatgcggcgcatggt
ctcggtgacggcgcggccgttctcccgggggcgcagctcgaagacgccgcctctcatttcgccgc
ggggcgggcggccgtgaggtagcgagacggcgctgactatgcatcttaacaattgctgtgtaggt
acgccgccaagggacctgattgagtccagatccaccggatccgaaaacctttggaggaaagcgtc
tatccagtcgcagtcgcaaggtaggctgagcaccgtggcgggcgggggcgggtcgggagagttcc
tggcggagatgctgctgatgatgtaattaaagtaggcggtcttgagaaggcggatggtggacagg
agcaccatgtctttgggtccggcctgttggatgcggaggcggtcggccatgccccaggcctcgtt
ctgacaccggcgcaggtctttgtagtaatcttgcatgagtctttccaccggcacttcttctcctt
cctcttcttcatctcgccggtggtttctcgcgccgcccatgcgcgtgaccccaaagcccctgagc
ggctgcagcagggccaggtcggcgaccacgcgctcggccaagatggcctgctgtacctgagtgag
ggtcctctcgaagtcatccatgtccacgaagcggtggtaggcacccgtgttgatggtgtaggtgc
agttggccatgacggaccagttgacggtctggtgtcccggctgcgagagctccgtgtaccgcagg
cgcgagaaggcgcgggaatcgaacacgtagtcgttgcaagtccgcaccagatactggtagcccac
caggaagtgcggcggaggttggcgatagaggggccagcgctgggtggcgggggcgccgggcgcca
ggtcttccagcatgaggcggtggtatccgtagatgtacctggacatccaggtgatgcctgcggcg
gtggtggtggcgcgcgcgtagtcgcggacccggttccagatgtttcgcaggggcgagaagtgttc
catggtcggcacgctctggccggtgaggcgcgcgcagtcgttgacgctctatacacacacaaaaa
cgaaagcgtttacagggctttcgttctgtagcctggaggaaagtaaatgggttgggttgcggtgt
gccccggttcgagaccaagctgagctcagccggctgaagccgcagctaacgtggtattggcagtc
ccgtctcgacccaggccctgtatcctccaggatacggtcgagagcccttttgctttcttggccaa
gcgcccgtggcgcgatctgggatagatggtcgcgatgagaggacaaaagcggctcgcttccgtag
tctggagaaacaatcgccagggttgcgttgcggcgtaccccggttcgagcccctatggcggcttg
gatcggccggaaccgcggctaacgtgggctgtggcagccccgtcctcaggaccccgccagccgac
ttctccagttacgggagcgagccccttttgtttttttattttttagatgcatcccgtgctgcggc
agatgcgcccctcgccccggcccgatcagcagcagcaacagcaggcatgcagacccccctctcct
ctccccgccccggtcaccacggccgcggcggccgtgtccggtgcggggggcgcgctggagtcaga
tgagccaccgcggcggcgacctaggcagtatctggacttggaagagggcgagggactggcgcggc
tgggggcgagctctccagagcgccacccgcgggtgcagttgaaaagggacgcgcgtgaggcgtac
ctgccgcggcaaaacctgtttcgcgaccgcgggggcgaggagcccgaggagatgcgggactgcag
gttccaagcggggcgcgagctgcgccgcggcttggacagacagcgcctgctgcgcgaggaggact
ttgagcccgacacgcagacgggcatcagccccgcgcgcgcgcacgtggccgcggccgacctggtg
accgcctacgagcagacggtgaaccaggagcgcaacttccaaaaaagcttcaacaaccacgtgcg
cacgctggtggcgcgcgaggaggtgaccctgggtctcatgcatctgtgggacctggtggaggcga
tcgtgcagaaccccagcagcaagcccctgaccgcgcagctgttcctggtggtgcagcacagcagg
gacaacgaggccttcagggaggcgctgctgaacatcaccgagccggaggggcgctggctcctgga
cctgataaacatcctgcagagcatagtggtgcaggagcgcagcctgagcctggccgagaaggtgg
cggccattaactattctatgctgagcctgggcaagttctacgctcgcaagatctacaagaccccc
tacgtgcccatagacaaggaggtgaagatagacagcttctacatgcgcatggcgctgaaggtgct
aaccctgagcgacgacctgggagtgtaccgcaacgagcgcatccacaaggccgtgagcgccagcc
ggcggcgcgagctgagcgaccgcgaactgatgcacagtctgcagcgcgcgctgaccggcgcgggc
gagggcgacagggaggtcgagtcctactttgacatgggggccgacctgcactggcagccgagccg
ccgcgccctggaagcggcgggggcgtacggcggccccctggcggccgatgacgaggaagaggagg
actatgagctagaggagggcgagtacctggaggactgacctggctggtggtgttttggtatagat
gcaagatccgaacgtggcggacccggcggtccgggcggcgctgcagagccagccgtccggcatta
actcctctgacgactgggccgcggccatgggtcgcatcatggccctgaccgcgcgcaaccccgag
gccttcaggcagcagcctcaggctaaccggctggcggccatcttggaagcggtagtgcccgcgcg
ctccaaccccacccacgagaaggtgctggccatagtcaacgcgctggcggagagcagggccatcc
gggcagacgaggccggactggtgtacgatgcgctgctgcagcgggtggcgcggtacaacagcggc
aacgtgcagaccaacctggaccgcctggtgacggacgtgcgcgaggccgtggcgcagcgcgagcg
cttgcatcaggacggcaacctgggctcgctggtggcgctaaacgccttccttagcacccagccgg
ccaacgtaccgcgggggcaggaggactacaccaacttcttgagcgcgctgcggctgatggtgacc
gaggtccctcagagcgaggtgtaccagtcggggcccgactacttcttccagaccagcagacaggg
cttgcaaaccgtgaacctgagccaggctttcaagaacctgcgggggctgtggggagtgaaggcgc
ccaccggcgaccgggctacggtgtccagcctgctaacccccaactcgcgcctgctgctgctgctg
atcgcgcccttcacggacagcgggagcgtctcgcgggagacctatctgggccacctgctgacgct
gtaccgcgaggccatcgggcaggcgcaggtggacgagcacaccttccaggagatcaccagcgtga
gccacgcgctggggcaggaggacacgggcagcctgcaggcgaccctgaactacctgctgaccaac
aggcggcagaagattcccacgctgcacagcctgacccaggaggaggagcgcatcttgcgctacgt
gcagcagagcgtgagcctgaacctgatgcgcgacggcgtgacgcccagcgtggcgctggacatga
ccgcgcgcaacatggaaccgggcatgtacgcttcccagcggccgttcatcaaccgcctgatggac
tacttgcatcgggcggcggccgtgaaccccgagtacttcaccaatgccattctgaatccccactg
gatgccccctccgggtttctacaacggggacttcgaggtgcctgaggtcaacgatgggttcctct
gggatgacatggatgacagtgtgttctcccccaacccgctgcgcgccgcgtctctgcgattgaag
gagggctctgacagggaaggaccaaggagtctggcctcctccctggctctgggggcggtgggcgc
cacgggcgcggcggcgcggggcagcagccccttccccagcctggcggactctctgaatagcgggc
gggtgagcaggccccgcttgctaggcgaggaggagtatctgaacaactccctgctgcagcccgtg
agggacaaaaacgctcagcggcagcagtttcccaacaatgggatagagagcctggtggacaagat
gtccagatggaagacgtatgcgcaggagtacaaggagtgggaggaccgccagccgcggcccctgc
cgccccctagacagcgctggcagcggcgcgcgtccaaccgccgctggaggcaggggcccgaggac
gatgatgactctgcagatgacagcagcgtgttggacctgggcgggagcgggaaccccttttcgca
cctgcgcccacgcctgggcaagatgttttaaaagagaaaaataaaaactcaccaaggccatggcg
acgagcgttggttttttgttcccttccttagtatgcggcgcgcggcgatgttcgaggaggggcct
cccccctcttacgagagcgcgatgggaatttctcctgcggcgcccctgcagcctccctacgtgcc
tcctcggtacctgcaacctacaggggggagaaatagcatctgttactctgagctgcagcccctgt
acgataccaccagactgtacctggtggacaacaagtccgcggacgtggcctccctgaactaccag
aacgaccacagcgattttttgaccacggtgatccaaaacaacgacttcaccccaaccgaggccag
tacccagaccataaacctggacaacaggtcgaactggggcggcgacctgaagactatcctgcaca
ccaatatgcccaacgtgaacgagttcatgttcaccaactcttttaaggcgcgggtgatggtggcg
cgcgagcagggggaggcgaagtacgagtgggtggacttcacgctgcccgagggcaactactcaga
gaccatgactctcgacctgatgaacaatgcgatcgtggaacactatctgaaagtgggcaggcaga
acggggtgaaggagagcgatatcggggtcaagtttgacaccagaaacttccgtctgggctgggac
cctgtgaccgggctggtcatgccgggggtctacaccaacgaggcctttcatcccgatatagtgct
cctgcccggctgtggggtggacttcacccagagccggctgagcaacctgctgggcgttcgcaagc
ggcaacctttccaggagggtttcaagatcacctatgaggatctggaggggggcaacattcccgcg
ctccttgatctggacgcctacgaggagagcttgaaacccgaggagagcgctggcgacagcggcga
gagtggcgaggagcaagccggcggcggcggcagcgcgtcggtagaaaacgaaagtactcccgcag
tggcggcggacgctgcggaggtcgagccggaggccatgcagcaggacgcagaggagggcgcgcag
gaggacatgaacaatggggagatcaggggcgacactttcgccacccggggcgaagaaaaagaggc
agaggcggcggcggcgacggcggaagccgaaaccgaggcagaggcagagcccgagaccgaagtta
tggaagacatgaatgatggagaacgtaggggtgacacgtttgccacccggggcgaagagaaggcg
gcggaggcagaagccgcggctgaggaggcggctgcggctgcggccaaggctgaggctgcggctga
ggctaaggtcgaagccgatgttgcggttgaggctcaggctgaggaggaggcggcggctgaagcag
ttaaggaaaaggcccaggcagagcaggaagagaaaaaacctgtcattcaacctctaaaagaagat
agcaaaaagcgcagttacaacgtcattgagggcagcacctttacccaataccgcagctggtacct
ggcttacaactacggcgacccggtcaagggggtgcgctcgtggaccctgctctgcacgccggacg
tcacctgcggctccgagcagatgtactggtcgctgccaaacatgatgcaagacccggtgaccttc
cgttccacgcggcaggttagcaactttccggtggtgggcgccgaactgctgccagtacactccaa
gagtttttacaacgagcaggccgtctactcccagctgatccgccaggccacctctctgacccacg
tgttcaatcgctttcccgagaaccagattttggcgcgcccgccggcccccaccatcaccaccgtc
agtgaaaacgttcctgccctcacagatcacgggacgctaccgctgcgcaacagcatctcaggagt
ccagcgagtgaccattactgacgccagacgccggacctgcccctacgtttacaaggccttgggca
tagtctcgccgcgcgtcctctccagtcgcactttttaaaacacatccacccacacgctccaaaat
atgtccgtactcatctcgcccagcaacaacaccggctgggggctgcgcgcacccagcaagatgt
ttggaggggcaaggaagcgctccgaccagcaccccgtgcgcgtgcgcggccactaccgcgcgccc
tggggtgcgcacaagcgcgggcgcacagggcgcaccactgtggatgatgtcattgactccgtagt
ggagcaggcgcgccactacacacccggcgcgccgaccgcctccgccgtgtccaccgtggaccagg
cgatcgaaagcgtggtacagggggcgcggcactatgccaaccttaaaagtcgccgccgccgcgtg
gcgcgccgccatcgccggagaccccgggctactgccgccgcgcgccttaccaaggctctgctcaa
gcgcgccaggcgaactggccaccgggccgccatgagggccgcacggcgggctgccgctgccgcga
gcgccgtggccccgcgggcacgaaggcgcgcggccgctgccgccgccgccgccatttccagcttg
gcctcgacgcggcgcggtaacatatactgggtgcgcgactcggtgagcggcacacgtgtgcccgt
gcgctttcgccccccacggaattagcacaagacaacatacacactgagtctcctgctgttgtgta
tcccagcggcgaccgtcagcagcggcgacatgtccaagcgcaaaattaaagaagagatgctccag
gtcatcgcgccggagatctatgggcccccgaagaaggaggaggaggattacaagccccgcaagct
aaagcgggtcaaaaagaaaaagaaagatgatgacgttgacgaggcggtggagtttgtccgccgca
tggcgcccaggcgccctgtgcagtggaagggtcggcgcgtgcagcgagtcctgcgccccggcacc
gcggtggtctttacgcccggcgagcgttccacgcgcactttcaagcgggtgtacgatgaggtgta
cggcgacgaggatctgttggagcaggccaaccatcgatttggggagtttgcatatgggaaacggc
ctcgcgagagtctaaaagaggacctgctggcgctaccgctggacgagggcaatcccaccccgagt
ctgaagccggtgaccctgcaacaggtgctgcctttgagcgcgcccagcgagcagaagcgagggtt
aaagcgcgagggcggggacctggcacccaccgtgcagttgatggtgcccaagcggcagaagctgg
aggacgtgctggagaaaatgaaagtagagcccgggatccagcccgagatcaaggtccgccctatc
aagcaggtggcgcccggcgtgggagtccagaccgtggacgttaggattcccacggaggagatgga
aacccaaaccgccactccctcttcggcagcaagcgccaccaccggcgccgcttcggtagaggtgc
agacggacccctggctacccgccgccactatcgccgtcgccgccgccccccgttcgcgcggacgc
aagagaaattatccagcggccagcgcgcttatgccccagtatgcgctgcatccatccatcgcgcc
cacccccggctaccgcgggtactcgtaccgcccgcgcagatcagccggcactcgcggccgccgcc
gccgtgcgaccacaaccagccgccgccgtcgccgccgccgccagccagtgctgacccccgtgtct
gtaaggaaggtggctcgctcggggagcacgctggtggtgcccagagcgcgctaccaccccagcat
cgtttaaagccggtctctgtatggttcttgcagatatggccctcacttgtcgccttcgcttcccg
gtgccgggataccgaggaagaactcaccgccgcaggggcatggcgggcagcggtctccgcggcgg
ccgtcgccatcgccggcgcgcaaagagcaggcgcatgcgcggcggtgtgttgcccctgctggtcc
cgctactcgccgcggcgatcggcgccgtgcccgggatcgcctccgtggccctgcaggcgtcccag
aaacattgactcttgcaaccttgcaagcttgcatttttggaggaaaaaataaaaaagtctagact
ctcacgctcgcttggtcctgtgactattttgtagaaaaaagatggaagacatcaactttgcgtcg
ctggccccgcgtcacggctcgcgcccgttcatgggagactggacagatatcggcaccagcaatat
gagcggtggcgccttcagctggggcagtctgtggagcggccttaaaaattttggttccaccatta
agaactatggcaacaaagcgtggaacagcagcacgggtcagatgctgagagacaagttgaaagag
cagaacttccaggagaaggtggcgcagggcctggcctctggcatcagcggggtggtggacatagc
taaccaggccgtgcagaaaaagataaacagtcatctggacccccgccctcaggtggaggaaacgc
ctccagccatggagacggtgtctcccgagggcaaaggcgaaaagcgcccgcggcccgacagggaa
gagaccctggtgtcacacaccgaggagccgccctcttacgaggaggcagtcaaggccggcctgcc
caccactcgccccatagctcccatggccaccggtgtggtgggtcacaggcaacacacccccgcaa
cactagatctgcccccgccgtccgagccgactcgccagccaaaggcggtgacggtgtccgctccc
tccacttccgccgccaacagagtgcctctgcgccgcgctgcgagcggcccccgggcctcgcgagt
cagcggcaactggcagagcacactgaacagcatcgtgggcctgggagtgaggagtgtgaagcgcc
gccgttgctactgaatgagcaagctagctaacgtgttgtatgtgtgtatgcgtcctatgtcgccg
ccagaggagctgttgagccgccggcgccgtctgcactccagcgaatttcaagatggcgaccccat
cgatgatgcctcagtggtcgtacatgcacatctcgggccaggacgcttcggagtacctgagcccc
gggctggtgcagttcgcccgcgccacagacacctacttcaacatgagtaacaagttcaggaaccc
cactgtggcgcccacccacgatgtgaccacggaccggtcgcagcgcctgacgctgcggttcatcc
ccgtggatcgggaggacaccgcttactcttacaaggcgcggttcacgctggccgtgggcgacaac
cgcgtgctggacatggcctccacttactttgacatccggggggtgctggacaggggccccacttt
taagccctactcgggcactgcctacaaccccctggcccccaagggcgcccccaattcttgtgagt
gggaacaagaggaaaatcaggtggtcgctgcagatgatgaacttgaagatgaagaagcgcaagca
caagaggaagcccctgtgaaaaaaattcatgtatatgctcaggcgcctctttctggcgaaaagat
ttccaaggatggtatccaaataggtactgaagtcgtaggagatacatctaaggacacttttgcag
ataaaacattccaacccgaacctcagataggcgagtctcagtggaacgaggctgatgccacagca
gcaggaggtagagttttgaaaaagactacccctatgagaccttgctatggatcctatgccaggcc
taccaatgccaacgggggtcaaggaattatggttgccaatgaacaaggagtgttggagtctaaag
tagaaatgcaatttttctctaacaccacaacccttaatgcgcgggatggaaccggcaatcccgaa
ccaaaggtggtgttgtacagcgaagatgtccacttggaatctcccgatactcatctgtcttacaa
gcccaaaaaggatgatgttaatgccaaaatcatgttgggtcagcaagccatgcccaacagaccca
acctcattggatttagagataatttcattgggcttatgttttacaacagcaccggtaacatggga
gtgctggcgggtcaggcctctcagttgaatgctgtggtggacttgcaggatagaaacacagaact
gtcatatcagcttctgcttgattcaattggggatagaaccagatacttctccatgtggaaccagg
cagtggatagctatgatccagatgtcagaattattgaaaaccatgggactgaggatgaactgccc
aactactgcttccctttgggcggcataggagttactgatacttatcaagggataaaaaataccaa
tggcaatggtcagtggaccaaagatgatcagttcgcggaccgcaacgaaataggggtgggaaaca
acttcgccatggagatcaacatccaggccaacctttggagaaacttcctctatgcaaacgtgggg
ctctacctgccagacaagctcaagtacaaccccaccaacgtggacatctctgacaaccccaacac
ctatgactacatgaacaagcgggtggtggcccctggcctggtggactgctttgtcaatgtgggag
ccaggtggtccctggactacatggacaacgtcaaccccttcaaccaccaccgcaatgcgggtctg
cgctaccgctccatgatcctgggcaacgggcgctatgtgccctttcacatccaggtaccccagaa
gttctttgccatcaagaacctcctgctcctgcccggctcctacacctacgagtggaacttcagga
aggatgtgaacatggtcctacagagctctctgggcaatgaccttagggtggatggggccagcatc
aagtttgacagcatcaccctctatgctacatttttccccatggcccacaacaccgcctccacgct
tgaggccatgctgagaaacgacaccaacgaccagtcctttaatgactacctctctggggccaaca
tgctctacccaatcccagccaaggccaccaacgtgcccatctccatcccctctcgcaactgggcc
gcctttagaggctgggcctttacccgccttaagaccaaggagaccccctccctgggctcgggttt
tgatccctactttgtttactcgggatccatcccctacctggatggcaccttctacctcaaccaca
ctttcaagaagatatccatcatgtatgactcctccgtcagctggccgggcaacgaccgcttgctc
acccccaatgagttcgaggtcaagcgcgccgtggacggcgagggctacaacgtggcccagtgcaa
catgaccaaggactggttcctggtgcagatgctggccaactacaacataggctaccagggctttt
acatcccagagagctacaaggacaggatgtactccttcttcagaaatttccaacccatgagccga
caggtggtggacgagaccaattacaaggactatcaagccattggcatcacccaccagcacaacaa
ctcgggtttcgtgggctacctggcgcccaccatgcgcgagggtcaggcctaccccgccaacttcc
cctaccccttgataggcaagaccgcggtcgacagcgtcacccagaaaaagttcctctgcgaccgc
accctctggcgcatccccttctctagcaacttcatgtccatgggtgcgctcacggacctgggcca
aaacctgctttatgccaactctgcccatgcgctggacatgacttttgaggtggaccccatggacg
agcccacccttctctatattgtgtttgaagtgttcgacgtggtcagagtgcaccagccgcaccgc
ggtgtcatcgagaccgtgtacctgcgtacgcccttctcagccggcaacgccaccacctaaggaga
cagcgccgccgccgcctgcatgacgggttccaccgagcaagagctcagggccattgccagagacc
tgggatgcggaccctattttttgggcacctatgacaaacgcttcccgggctttatctcccgagac
aagctcgcctgcgccattgtcaacacggccgcgcgcgagaccgggggcgtgcactggctggcctt
tggctgggacccgcgctccaaaacttgctacctctttgacccctttggcttctccgatcagcgcc
tcaggcagatttatgagtttgagtacgaggggctgctgcgccgcagcgcgctcgcctcctcgccc
gaccgctgcatcacccttgagaagtccaccgaaaccgtgcaggggccccactcggccgcctgcgg
tctcttctgttgcatgtttttgcacgcctttgtgcactggcctcagagtcccatggattgcaacc
ccaccatgaacttgctaaagggagtgcccaacgccatgctccagagcccccaggtccagcccacc
ctgcgccgcaaccaggaacagctttaccgcttcctggagcgccactccccctacttccgcagcca
cagcgcgcgcatccggggggccacctctttttgccacttgcaagaaaacatgcaagacggaaaat
gatgtacagcatgcttttaataaatgtaaagactgtgcactttaattatacacgggctctttctg
gttatttattcaacaccgccgtcgccatttagaaatcgaaagggttctgccgtgcgtcgccgtgc
gccacgggcagagacacgttgcgatactggaagcggctcgcccacttgaactcgggcaccaccat
gcggggcagtggttcctcggggaagttctcgctccacagggtgcgggtcagctgcagcgcgctca
ggaggtcgggagccgagatcttgaagtcgcagttggggccggaaccctgcgcgcgcgagttgcgg
tacacggggttgcagcactggaacaccagcagggccggattattcacgctggccagcaggctctc
gtcgctgatcatgtcgctgtccagatcctccgcgttgctcagggcgaatggggtcatcttgcaga
cctgcctgcccaggaaaggcgggagcccaggcttgccgttgcagtcgcagcgcaggggcattagc
aggtgcccacggcccgactgcgcctgcgggtacaacgcgcgcatgaaggcttcgatctgcctaaa
agccacctgggtcttggctccctccgaaaagaacatcccacaggacttgctggagaactggttcg
cgggacagctggcatcgtgcaggcagcagcgcgcgtcagtgttggcaatctgcaccacgttgcga
ccccaccggtttttcactatcttggccttggaagcctgctcctttagcgcgcgctggccgttctc
gctggtcacatccatctctatcacctgttccttgttgatcatgtttgtcccgtgcagacacttta
ggtcgccctccgtctgggtgcagcggtgctcccacagcgcgcaaccggtgggctcccaattcttg
tgggtcacccccgcgtaggcctgcaggtaggcctgcaggaagcgccccatcatggtcataaaggt
cttctggctcgtaaaggtcagctgcaggccgcgatgctcttcgttcagccaggtcttgcagatgg
cggccagcgcctcggtctgctcgggcagcatcttaaaatttgtcttcaggtcgttatccacgtgg
tacttgtccatcatggcacgcgccgcctccatgcccttctcccaggcggacaccatgggcaggct
tagggggtttatcacttccagcggcgaggacaccgtactttcgatttcttcttcctccccctctt
cccggcgcgcgcccccgctgttgcgcgctcttaccgcctgcaccaaggggtcgtcttcaggcaag
cgccgcaccgagcgcttgccgcccttgacctgcttgatcagtaccggcgggttgctgaagcccac
catggtcagcgccgcctgctcttcttcgtcttcgctgtctaccactatttctggggaggggcttc
tccgctctgcggcaaaggcggcggatcgcttcttttttttcttgggagccgccgcgatggagtcc
gccacggcgaccgaggtcgagggcgtggggctgggggtgcgcggtaccagggcctcgtcgccctc
ggactcttcctctgactccaggcggcggcggagtcgcttctttgggggcgcgcgcgtcagcggcg
gcggagacggggacggggacggggacgggacgccctccacagggggtggtcttcgcgcagacccg
cggccgcgctcgggggtcttctcgcgctggtcttggtcccgactggccattgtatcctcctcctc
ctaggcagagagacataaggagtctatcatgcaagtcgagaaggaggagagcttaaccaccccct
cagagaccgccgatgcgcccgccgtcgccgtcgcccccgctaccgccgacgcgcccgccacaccg
agcgacacccccacggacccccccgccgacgcacccctgttcgaggaagcggccgtggagcagga
cccgggctttgtctcggcagaggaggatttgcaagaggaggagaataaggaggagaagccctcag
tgccaaaagatcataaagagcaagacgagcacgacgcagacgcacaccagggtgaagtcgggcgg
ggggacggagggcatggcggcgccgactacctagacgaaggaaacgacgtgctcttgaagcacct
gcatcgtcagtgcgccatcgtctgcgacgctctgcaggagcgcagcgaggtgcccctcagcgtgg
cggaggtcagccgcgcctacgagctcagcctcttttccccccgggtgcccccccgccgccgcgaa
aacggcacatgcgagcccaacccgcgcctcaacttctaccccgcctttgtggtgcccgaggtcct
ggccacctatcacatcttctttcaaaattgcaagatccccatctcgtgccgcgccaaccgtagcc
gcgccgataagatgctggccctgcgccagggcgaccacatacctgatatcgccgctttggaagat
gtgccaaagatcttcgagggtctggggcgcaacgagaagcgggcagcaaactctctgcaacagga
aaacagcgaaaatgagagtcacactggagcgctggtggagctggagggcgacaacgcccgcctgg
cggtgctcaagcgcagcatcgaggtcacccactttgcctaccccgcgctcaacctgccccccaaa
gtcatgaacgcggtcatggacgggctgatcatgcgccgcggccggcccctcgctccagatgcaaa
cttgcatgaggagaccgaggacggtcagcccgtggtcagcgacgagcagctgacgcgctggctgg
agagcgcggaccccgccgaactggaggagcggcgcaagatgatgatggccgcggtgctggtcacc
gtagagctggagtgtctgcagcgcttcttcggtgaccccgagatgcagagaaaggtcgaggagac
cctacactacaccttccgccagggctacgtgcgccaggcttgcaagatctccaacgtggagctca
gcaacctggtgtcctacctgggcatcttgcatgaaaaccgccttgggcagagcgtgctacactcc
accctgcgcggggaggcgcgccgcgactacgtgcgcgactgcgtttacctcttcctctgctacac
ctggcagacggccatgggggtctggcagcagtgcctggaggagcgcaacctcaaggagctggaga
agcttctgcagcgcgcgctcaaagacctctggacgggcttcaacgagcgctcggtggccgccgcg
ctagccgacctcatcttccccgagcgcctgctcaaaaccctccagcaggggctgcccgacttcac
cagccaaagcatgttgcaaaattttaggaactttatcctggagcgttctggcatcctacccgcca
cctgctgcgccctgcccagcgactttgtccccctcgtgtaccgcgagtgccccccgccgctgtgg
ggccactgctacctgttccaactggccaactacctgtcctaccacgcggacctcatggaggactc
cagcggcgaggggctcatggagtgccactgccgctgcaacctctgcacgccccaccgctccctgg
tctgcaacacccaactgctcagcgagagtcagattatcggtaccttcgagctacagggtccgtcc
tcctcagacgagaagtccgcggctccggggctaaaactcactccggggctgtggacttccgccta
cctgcgcaaatttgtacctgaagactaccacgcccacgaaatcaggttttacgaggaccaatccc
gcccgcccaaggcggagctgaccgcctgcgtcatcacccagggcgagatcctaggccaattgcaa
gccatccaaaaagcccgccaagagtttttgctgaagaggggtcggggggtgtatctggaccccca
gtcgggtgaggagctcaacccggttcccccgctgccaccgccgcgggaccttgcttcccaggata
agcatcgccatggctcccagaaagaagcagcagcggccgccgctgccgccgccccacatgctgga
ggaagaggaggaatactgggacagtcaggcagaggaggtttcggacgaggaggagccggagacgg
agatggaagagtgggaggaggacagcttagacgaggaggcttccgaagccgaagaggcaggcgca
acaccgtcaccctcggccgcagccccctcgcaggcgcccccgaagtccgctcccagcatcagcag
caacagcagcgctataacctccgctcctccaccgccgcgacccacggccgaccgcagacccaacc
gtagatgggacaccaccggaaccggggccggtaagtcctccgggagaggcaagcaagcgcagcgc
caaggctaccgctcgtggcgcgctcacaagaacgccatagtcgcttgcttgcaagactgcggggg
gaacatctccttcgcccgccgcttcctgctcttccaccacggtgtggccttcccccgtaacgtcc
tgcattactaccgtcatctctacagcccctactgcggcggcagtgagccagaggcggccagcggc
ggcggcgcccgtttcggtgcctaggaagacccagggcaagacttcagccaagaaactcgcggcga
ccgcggcgaacgcggtcgcgggggccctgcgcctgacggtgaacgaacccctgtcgacccgcgaa
ctgaggaaccgaatcttccccactctctatgccatcttccagcagagcagagggcaggatcagga
actgaaagtaaaaaacaggtctctgcgctccctcacccgcagctgtctgtatcacaagagcgaag
accagcttcggcgcacgctggaggacgctgaggcactcttcagcaaatactgcgcgctcactctt
aaggactagctccgcgcccttctcgaatttaggcgggaacgcctacgtcatcgcagcgccgccgt
catgagcaaggacattcccacgccatacatgtggagctatcagccgcagatgggactcgcggcgg
gcgcctcccaagactactccacccgcatgaactggctcagtgccggcccacacatgatctcacag
gttaatgacatccgcacccatcgaaaccaaatattggtgaagcaggcggcaattaccaccacgcc
ccgcaataatcccaaccccagggagtggcccgcgtccctggtgtatcaggaaattcccggcccca
ccaccgtactacttccgcgtgattcccaggccgaagtccaaatgactaactcaggggcacagctc
gcgggcggctgtcgtcacagggtgcggcctcctcgccagggtataactcacctggagatccgagg
cagaggtattcagctcaacgacgagtcggtgagctcctcgctcggtctcagacctgacgggacct
tccagatagccggagccggccgatcttccttcacgccccgccaggcgtacctgactctgcagagc
tcgtcctcggcgccgcgctcgggcggcatcgggactctccagttcgtgcaggagtttgtgccctc
ggtctacttcaaccccttctcgggctctcccggtcgctacccggaccagtttatcccgaactttg
acgccgcgagggactcggtggacggctacgactgaatgtcgggtggacccggtgcagagcaactt
cgcctgaagcaccttgaccactgccgccgccctcagtgctttgcccgctgtcagaccggtgagtt
ccagtacttttccctgcccgactcgcacccggacggcccggcgcacggggtgcgctttttcatcc
cgagtcaggtccgctctaccctaatcagggagttcaccgcccgtcccctactggcggagttggaa
aaggggccttctatcctaaccattgcctgcatttgctctaaccctggattacaccaagatctttg
ctgtcatttgtgtgctgagtataataaaggctgagatcagaatctactcggaccttatccctttc
aattgatcataactgtaatcaataaaaaatcacttacttgaaatctgatagcaagactctgtcca
attttttcagcaacacttccttcccctcctcccaactctggtactctaggcgcctcctagctgca
aacttcctccacagtctgaagggaatgtcagattcctcctcctgtccctccgcacccacgatctt
catgttgttacagatgaaacgcgcgagatcgtctgacgagaccttcaaccccgtgtacccctacg
ataccgagatcgctccgacttctgtccctttccttacccctccctttgtatcatccgcaggaatg
caagaaaatccagctggggtgctgtccctgcacctgtcagagccccttaccacccacaatggggc
cctgactctaaaaatggggggcggcctgaccctggacaaggaagggaatctcacttcccaaaaca
tcaccagtgtcgatccccctctcaaaaaaagcaagaacaacatcagccttcagaccgccgcaccc
ctcgccgtcagctccggggccctaaccctttttgccactccccccctagcggtcagtggcgacaa
ccttactgtgcagtctcaggcccctcttactttggaagactcaaaactaactctggccaccaaag
gacccctaactgtgtccgaaggcaaacttgtcctagaaacagagcctcccctgcatgcaagtgac
agcagtagcctgggccttagcgtcacggccccacttagcattaacaatgacagcctaggactaga
catgcaagcgcccatcagctctcgagatggaaaactggctctaacagtggcggcccccctaactg
tggccgagggtatcaatgctttggcagtagccacaggtaatggtattggactaaatgaaaccaac
acacacctgcaggcaaaactggtcgcgcccctaggctttgataccaacggcaacattaagctaag
cgtcgcaggaggcatgaggctaaacaataacacactgatactagatgtaaactacccatttgagg
ctcaaggccaactgagcctaagagtgggctcgggcccactatatgtagattctagtagtcataac
ctaaccattagatgccttaggggattgtatgtaacatcttctaacaaccaaaacggtctagaggc
caacattaaactaacaaaaggccttgtgtatgacggaaatgccatagcagttaatgttggcaaag
ggctggaatacagccctactggcacaacagaaaaacctatacagactaaaataggtctaggcatg
gagtatgacactgagggagccatgatgacaaaactaggctctggactaagctttgacaattcagg
agccattgtggtgggaaacaaaaatgatgacaggcttactttgtggaccacaccggacccatcgc
ccaactgtcagatttactctgaaaaagatgctaaactaaccttggtactgactaaatgtggcagt
caggttgtaggcacagtatctattgccgctcttaaaggtagccttgtgccaatcactagtgcaat
cagtgtggttcagatatacctaaggtttgatgaaaatggggtgctgatgagtaactcttcactta
atggcgaatactggaattttagaaacggagactcaactaatggcacaccatatacaaacgcagtg
ggttttatgcctaatctactggcctatcctaaaggtcaaactacaactgcaaaaagtaacattgt
cagccaggtctacatgaacggggacgatactaaacccatgacatttacaatcaacttcaatggcc
ttagtgaaacaggggatacccctgtcagtaaatattccatgacattctcatggaggtggccaaat
ggaagctacatagggcacaattttgtaacaaactcctttactttctcctacatcgcccaagaata
aagaaagcacagagatgcttgtttttgatttcaaaattgtgtgcttttatttattttcaagctta
cagtatttccagtagtcattagaatagagcttaattaaactgcatgagaacccttccacatagct
taaatactagtggagaagtactcgcctacatgggggtagagtcataatcgtgcatcaggataggg
cggtggtgctgcagcagcgcgcgaataaactgctgccgccgccgctccgtcctgcaggaatacaa
catggcagtggtctcctcagcgatgattcgcaccgcccgcagcataaggcgccttgtcctccggg
cacagcagcgcaccctgatctcacttaaatcagcacagtaactgcagcacagcaccacaatattg
ttcaaaatcccacagtgcaaggcgctgtatccaaagctcatggcggggaccacagaacccacgtg
gccatcataccacaagcgcaggtagattaagtggcgacccctcataaacacgctggacataaaca
ttacctcttttggcatgttgtaattcaccacctcccggtaccatataaacctctgattaaacatg
gcgccatccaccaccatcctaaaccagctggccaaaacctgcccgccggctatacactgcaggga
accgggactggaacaatgacagtggagagcccaggactcgtaaccatggatcatcatgctcgtca
tgatatcaatgttggcacaacacaggcacacgtgcatacacttcctcaggattacaagctcctcc
cgcgttagaaccatatcccagggaacaacccattcctgaatcagcgtaaatcccacactgcaggg
aagacctcgcacgtaactcacgttgtgcattgtcaaagtgttacattcgggcagcagcggatgat
cctccagtatggtagcgcgggtttctgtctcaaaaggaggtagacgatccctactgtacggagtg
cgccgagacaaccgagatcgtgttggtcgtagtgtcatgccaaatggaacgccggacgtagtcat
atttcctgaagtcttcactctcacagcaccagcactaatcagagtgtgaagagggccaagtgccg
aacgagtatatataggaattaaaaatgacgtaaatgtgtaaaggtcaaaaaacgcccagaaaaat
acacagaccaacgcccgaaacgaaaacccgcgaaaaaatacccagaagttcctcaacaaccgcca
cttccgctttcccacgatacgtcacttcctcaaaaatagcaaactacatttcccacatgtacaaa
accaaaacccctccccttgtcaccgcccacaacttacataatcacaaacgtcaaagcctacgtca
cccgccccgcctcgccccgcccacctcattatcatattggcctcaatccaaaataaggtatatta
ttgatgatg

### Self-Replicating RNA Vector Production

[0970] The TC-83 strain of Venezuelan Equine Encephalitis Virus (VEEV) genome sequence served as the base sequence used to construct the replicon of the invention. This sequence was modified by placing the Downstream LooP (DLP) from Sindbis virus upstream of the non-structural protein 1 (nsP1) with the two joined by a 2A ribosome skipping element from porcine teschovirus-1. The first 193 nucleotides of nsP1 were duplicated downstream of the 5′ UTR and upstream of the DLP except for the start codon, which was mutated to TAG. This insured all regulatory and secondary structures necessary for replication were maintained but prevented translation of this partial nsp1 sequence. The structural genes were removed and EcoR V and Asc I restriction sites were placed downstream of the subgenomic promoter as a multiple cloning site (MCS) to facilitate insertion of any heterologous gene of interest (FIG. 10). The prostate neoantigens of the disclosure or synthetic genes comprising the optimized layouts of scrambled neoantigens designed for GAd20 and MVA expression were inserted in the cloning site. Each antigen was synthesized as a dsDNA fragment by IDT with 40 bp of homology to the MCS at their 5′ and 3′ ends. These were then cloned into the VEEV derived self-replicating RNA vector digested with EcoRV and AscI using NEB HiFi DNA assembly master mix (cat #E2621S). All constructs were sequenced verified.

The polynucleotide sequence of the full self-replicating
RNA plasmid
SEQ ID NO: 981
TAATACGACTCACTATAGATAGGCGGCGCATGAGAGAAGCCCAGACCAATTACCTACCCAAATAG
GAGAAAGTTCACGTTGACATCGAGGAAGACAGCCCATTCCTCAGAGCTTTGCAGCGGAGCTTCCC
GCAGTTTGAGGTAGAAGCCAAGCAGGTCACTGATAATGACCATGCTAATGCCAGAGCGTTTTCGC
ATCTGGCTTCAAAACTGATCGAAACGGAGGTGGACCCATCCGACACGATCCTTGACATTGGAATA
GTCAGCATAGTACATTTCATCTGACTAATACTACAACACCACCACCATGAATAGAGGATTCTTTA
ACATGCTCGGCCGCCGCCCCTTCCCGGCCCCCACTGCCATGTGGAGGCCGCGGAGAAGGAGGCAG
GCGGCCCCGGGAAGCGGAGCTACTAACTTCAGCCTGCTGAAGCAGGCTGGAGACGTGGAGGAGAA
CCCTGGACCTGAGAAAGTTCACGTTGACATCGAGGAAGACAGCCCATTCCTCAGAGCTTTGCAGC
GGAGCTTCCCGCAGTTTGAGGTAGAAGCCAAGCAGGTCACTGATAATGACCATGCTAATGCCAGA
GCGTTTTCGCATCTGGCTTCAAAACTGATCGAAACGGAGGTGGACCCATCCGACACGATCCTTGA
CATTGGAAGTGCGCCCGCCCGCAGAATGTATTCTAAGCACAAGTATCATTGTATCTGTCCGATGA
GATGTGCGGAAGATCCGGACAGATTGTATAAGTATGCAACTAAGCTGAAGAAAAACTGTAAGGAA
ATAACTGATAAGGAATTGGACAAGAAAATGAAGGAGCTCGCCGCCGTCATGAGCGACCCTGACCT
GGAAACTGAGACTATGTGCCTCCACGACGACGAGTCGTGTCGCTACGAAGGGCAAGTCGCTGTTT
ACCAGGATGTATACGCGGTTGACGGACCGACAAGTCTCTATCACCAAGCCAATAAGGGAGTTAGA
GTCGCCTACTGGATAGGCTTTGACACCACCCCTTTTATGTTTAAGAACTTGGCTGGAGCATATCC
ATCATACTCTACCAACTGGGCCGACGAAACCGTGTTAACGGCTCGTAACATAGGCCTATGCAGCT
CTGACGTTATGGAGCGGTCACGTAGAGGGATGTCCATTCTTAGAAAGAAGTATTTGAAACCATCC
AACAATGTTCTATTCTCTGTTGGCTCGACCATCTACCACGAGAAGAGGGACTTACTGAGGAGCTG
GCACCTGCCGTCTGTATTTCACTTACGTGGCAAGCAAAATTACACATGTCGGTGTGAGACTATAG
TTAGTTGCGACGGGTACGTCGTTAAAAGAATAGCTATCAGTCCAGGCCTGTATGGGAAGCCTTCA
GGCTATGCTGCTACGATGCACCGCGAGGGATTCTTGTGCTGCAAAGTGACAGACACATTGAACGG
GGAGAGGGTCTCTTTTCCCGTGTGCACGTATGTGCCAGCTACATTGTGTGACCAAATGACTGGCA
TACTGGCAACAGATGTCAGTGCGGACGACGCGCAAAAACTGCTGGTTGGGCTCAACCAGCGTATA
GTCGTCAACGGTCGCACCCAGAGAAACACCAATACCATGAAAAATTACCTTTTGCCCGTAGTGGC
CCAGGCATTTGCTAGGTGGGCAAAGGAATATAAGGAAGATCAAGAAGATGAAAGGCCACTAGGAC
TACGAGATAGACAGTTAGTCATGGGGTGTTGTTGGGCTTTTAGAAGGCACAAGATAACATCTATT
TATAAGCGCCCGGATACCCAAACCATCATCAAAGTGAACAGCGATTTCCACTCATTCGTGCTGCC
CAGGATAGGCAGTAACACATTGGAGATCGGGCTGAGAACAAGAATCAGGAAAATGTTAGAGGAGC
ACAAGGAGCCGTCACCTCTCATTACCGCCGAGGACGTACAAGAAGCTAAGTGCGCAGCCGATGAG
GCTAAGGAGGTGCGTGAAGCCGAGGAGTTGCGCGCAGCTCTACCACCTTTGGCAGCTGATGTTGA
GGAGCCCACTCTGGAAGCCGATGTCGACTTGATGTTACAAGAGGCTGGGGCCGGCTCAGTGGAGA
CACCTCGTGGCTTGATAAAGGTTACCAGCTACGATGGCGAGGACAAGATCGGCTCTTACGCTGTG
CTTTCTCCGCAGGCTGTACTCAAGAGTGAAAAATTATCTTGCATCCACCCTCTCGCTGAACAAGT
CATAGTGATAACACACTCTGGCCGAAAAGGGCGTTATGCCGTGGAACCATACCATGGTAAAGTAG
TGGTGCCAGAGGGACATGCAATACCCGTCCAGGACTTTCAAGCTCTGAGTGAAAGTGCCACCATT
GTGTACAACGAACGTGAGTTCGTAAACAGGTACCTGCACCATATTGCCACACATGGAGGAGCGCT
GAACACTGATGAAGAATATTACAAAACTGTCAAGCCCAGCGAGCACGACGGCGAATACCTGTACG
ACATCGACAGGAAACAGTGCGTCAAGAAAGAACTAGTCACTGGGCTAGGGCTCACAGGCGAGCTG
GTGGATCCTCCCTTCCATGAATTCGCCTACGAGAGTCTGAGAACACGACCAGCCGCTCCTTACCA
AGTACCAACCATAGGGGTGTATGGCGTGCCAGGATCAGGCAAGTCTGGCATCATTAAAAGCGCAG
TCACCAAAAAAGATCTAGTGGTGAGCGCCAAGAAAGAAAACTGTGCAGAAATTATAAGGGACGTC
AAGAAAATGAAAGGGCTGGACGTCAATGCCAGAACTGTGGACTCAGTGCTCTTGAATGGATGCAA
ACACCCCGTAGAGACCCTGTATATTGACGAAGCTTTTGCTTGTCATGCAGGTACTCTCAGAGCGC
TCATAGCCATTATAAGACCTAAAAAGGCAGTGCTCTGCGGGGATCCCAAACAGTGCGGTTTTTTT
AACATGATGTGCCTGAAAGTGCATTTTAACCACGAGATTTGCACACAAGTCTTCCACAAAAGCAT
CTCTCGCCGTTGCACTAAATCTGTGACTTCGGTCGTCTCAACCTTGTTTTACGACAAAAAAATGA
GAACGACGAATCCGAAAGAGACTAAGATTGTGATTGACACTACCGGCAGTACCAAACCTAAGCAG
GACGATCTCATTCTCACTTGTTTCAGAGGGTGGGTGAAGCAGTTGCAAATAGATTACAAAGGCAA
CGAAATAATGACGGCAGCTGCCTCTCAAGGGCTGACCCGTAAAGGTGTGTATGCCGTTCGGTACA
AGGTGAATGAAAATCCTCTGTACGCACCCACCTCTGAACATGTGAACGTCCTACTGACCCGCACG
GAGGACCGCATCGTGTGGAAAACACTAGCCGGCGACCCATGGATAAAAACACTGACTGCCAAGTA
CCCTGGGAATTTCACTGCCACGATAGAGGAGTGGCAAGCAGAGCATGATGCCATCATGAGGCACA
TCTTGGAGAGACCGGACCCTACCGACGTCTTCCAGAATAAGGCAAACGTGTGTTGGGCCAAGGCT
TTAGTGCCGGTGCTGAAGACCGCTGGCATAGACATGACCACTGAACAATGGAACACTGTGGATTA
TTTTGAAACGGACAAAGCTCACTCAGCAGAGATAGTATTGAACCAACTATGCGTGAGGTTCTTTG
GACTCGATCTGGACTCCGGTCTATTTTCTGCACCCACTGTTCCGTTATCCATTAGGAATAATCAC
TGGGATAACTCCCCGTCGCCTAACATGTACGGGCTGAATAAAGAAGTGGTCCGTCAGCTCTCTCG
CAGGTACCCACAACTGCCTCGGGCAGTTGCCACTGGAAGAGTCTATGACATGAACACTGGTACAC
TGCGCAATTATGATCCGCGCATAAACCTAGTACCTGTAAACAGAAGACTGCCTCATGCTTTAGTC
CTCCACCATAATGAACACCCACAGAGTGACTTTTCTTCATTCGTCAGCAAATTGAAGGGCAGAAC
TGTCCTGGTGGTCGGGGAAAAGTTGTCCGTCCCAGGCAAAATGGTTGACTGGTTGTCAGACCGGC
CTGAGGCTACCTTCAGAGCTCGGCTGGATTTAGGCATCCCAGGTGATGTGCCCAAATATGACATA
ATATTTGTTAATGTGAGGACCCCATATAAATACCATCACTATCAGCAGTGTGAAGACCATGCCAT
TAAGCTTAGCATGTTGACCAAGAAAGCTTGTCTGCATCTGAATCCCGGCGGAACCTGTGTCAGCA
TAGGTTATGGTTACGCTGACAGGGCCAGCGAAAGCATCATTGGTGCTATAGCGCGGCAGTTCAAG
TTTTCCCGGGTATGCAAACCGAAATCCTCACTTGAAGAGACGGAAGTTCTGTTTGTATTCATTGG
GTACGATCGCAAGGCCCGTACGCACAATCCTTACAAGCTTTCATCAACCTTGACCAACATTTATA
CAGGTTCCAGACTCCACGAAGCCGGATGTGCACCCTCATATCATGTGGTGCGAGGGGATATTGCC
ACGGCCACCGAAGGAGTGATTATAAATGCTGCTAACAGCAAAGGACAACCTGGCGGAGGGGTGTG
CGGAGCGCTGTATAAGAAATTCCCGGAAAGCTTCGATTTACAGCCGATCGAAGTAGGAAAAGCGC
GACTGGTCAAAGGTGCAGCTAAACATATCATTCATGCCGTAGGACCAAACTTCAACAAAGTTTCG
GAGGTTGAAGGTGACAAACAGTTGGCAGAGGCTTATGAGTCCATCGCTAAGATTGTCAACGATAA
CAATTACAAGTCAGTAGCGATTCCACTGTTGTCCACCGGCATCTTTTCCGGGAACAAAGATCGAC
TAACCCAATCATTGAACCATTTGCTGACAGCTTTAGACACCACTGATGCAGATGTAGCCATATAC
TGCAGGGACAAGAAATGGGAAATGACTCTCAAGGAAGCAGTGGCTAGGAGAGAAGCAGTGGAGGA
GATATGCATATCCGACGACTCTTCAGTGACAGAACCTGATGCAGAGCTGGTGAGGGTGCATCCGA
AGAGTTCTTTGGCTGGAAGGAAGGGCTACAGCACAAGCGATGGCAAAACTTTCTCATATTTGGAA
GGGACCAAGTTTCACCAGGCGGCCAAGGATATAGCAGAAATTAATGCCATGTGGCCCGTTGCAAC
GGAGGCCAATGAGCAGGTATGCATGTATATCCTCGGAGAAAGCATGAGCAGTATTAGGTCGAAAT
GCCCCGTCGAAGAGTCGGAAGCCTCCACACCACCTAGCACGCTGCCTTGCTTGTGCATCCATGCC
ATGACTCCAGAAAGAGTACAGCGCCTAAAAGCCTCACGTCCAGAACAAATTACTGTGTGCTCATC
CTTTCCATTGCCGAAGTATAGAATCACTGGTGTGCAGAAGATCCAATGCTCCCAGCCTATATTGT
TCTCACCGAAAGTGCCTGCGTATATTCATCCAAGGAAGTATCTCGTGGAAACACCACCGGTAGAC
GAGACTCCGGAGCCATCGGCAGAGAACCAATCCACAGAGGGGACACCTGAACAACCACCACTTAT
AACCGAGGATGAGACCAGGACTAGAACGCCTGAGCCGATCATCATCGAAGAGGAAGAAGAGGATA
GCATAAGTTTGCTGTCAGATGGCCCGACCCACCAGGTGCTGCAAGTCGAGGCAGACATTCACGGG
CCGCCCTCTGTATCTAGCTCATCCTGGTCCATTCCTCATGCATCCGACTTTGATGTGGACAGTTT
ATCCATACTTGACACCCTGGAGGGAGCTAGCGTGACCAGCGGGGCAACGTCAGCCGAGACTAACT
CTTACTTCGCAAAGAGTATGGAGTTTCTGGCGCGACCGGTGCCTGCGCCTCGAACAGTATTCAGG
AACCCTCCACATCCCGCTCCGCGCACAAGAACACCGTCACTTGCACCCAGCAGGGCCTGCTCGAG
AACCAGCCTAGTTTCCACCCCGCCAGGCGTGAATAGGGTGATCACTAGAGAGGAGCTCGAGGCGC
TTACCCCGTCACGCACTCCTAGCAGGTCGGTCTCGAGAACCAGCCTGGTCTCCAACCCGCCAGGC
GTAAATAGGGTGATTACAAGAGAGGAGTTTGAGGCGTTCGTAGCACAACAACAATGACGGTTTGA
TGCGGGTGCATACATCTTTTCCTCCGACACCGGTCAAGGGCATTTACAACAAAAATCAGTAAGGC
AAACGGTGCTATCCGAAGTGGTGTTGGAGAGGACCGAATTGGAGATTTCGTATGCCCCGCGCCTC
GACCAAGAAAAAGAAGAATTACTACGCAAGAAATTACAGTTAAATCCCACACCTGCTAACAGAAG
CAGATACCAGTCCAGGAAGGTGGAGAACATGAAAGCCATAACAGCTAGACGTATTCTGCAAGGCC
TAGGGCATTATTTGAAGGCAGAAGGAAAAGTGGAGTGCTACCGAACCCTGCATCCTGTTCCTTTG
TATTCATCTAGTGTGAACCGTGCCTTTTCAAGCCCCAAGGTCGCAGTGGAAGCCTGTAACGCCAT
GTTGAAAGAGAACTTTCCGACTGTGGCTTCTTACTGTATTATTCCAGAGTACGATGCCTATTTGG
ACATGGTTGACGGAGCTTCATGCTGCTTAGACACTGCCAGTTTTTGCCCTGCAAAGCTGCGCAGC
TTTCCAAAGAAACACTCCTATTTGGAACCCACAATACGATCGGCAGTGCCTTCAGCGATCCAGAA
CACGCTCCAGAACGTCCTGGCAGCTGCCACAAAAAGAAATTGCAATGTCACGCAAATGAGAGAAT
TGCCCGTATTGGATTCGGCGGCCTTTAATGTGGAATGCTTCAAGAAATATGCGTGTAATAATGAA
CAAATTAAAAGGACCAAAAGCTGCTGCTCTTTTTGCGAAGACACATAATTTGAATATGTTGCAGG
ACATACCAATGGACAGGTTTGTAATGGACTTAAAGAGAGACGTGAAAGTGACTCCAGGAACAAAA
CATACTGAAGAACGGCCCAAGGTACAGGTGATCCAGGCTGCCGATCCGCTAGCAACAGCGTATCT
GTGCGGAATCCACCGAGAGCTGGTTAGGAGATTAAATGCGGTCCTGCTTCCGAACATTCATACAC
TGTTTGATATGTCGGCTGAAGACTTTGACGCTATTATAGCCGAGCACTTCCAGCCTGGGGATTGT
GTTCTGGAAACTGACATCGCGTCGTTTGATAAAAGTGAGGACGACGCCATGGCTCTGACCGCGTT
AATGATTCTGGAAGACTTAGGTGTGGACGCAGAGCTGTTGACGCTGATTGAGGCGGCTTTCGGCG
AAATTTCATCAATACATTTGCCCACTAAAACTAAATTTAAATTCGGAGCCATGATGAAATCTGGA
ATGTTCCTCACACTGTTTGTGAACACAGTCATTAACATTGTAATCGCAAGCAGAGTGTTGAGAGA
ACGGCTAACCGGATCACCATGTGCAGCATTCATTGGAGATGACAATATCGTGAAAGGAGTCAAAT
CGGACAAATTAATGGCAGACAGGTGCGCCACCTGGTTGAATATGGAAGTCAAGATTATAGATGCT
GTGGTGGGCGAGAAAGCGCCTTATTTCTGTGGAGGGTTTATTTTGTGTGACTCCGTGACCGGCAC
AGCGTGCCGTGTGGCAGACCCCCTAAAAAGGCTGTTTAAGCTTGGCAAACCTCTGGCAGCAGACG
ATGAACATGATGATGACAGGAGAAGGGCATTGCATGAAGAGTCAACACGCTGGAACCGAGTGGGT
ATTCTTTCAGAGCTGTGCAAGGCAGTAGAATCAAGGTATGAAACCGTAGGAACTTCCATCATAGT
TATGGCCATGACTACTCTAGCTAGCAGTGTTAAATCATTCAGCTACCTGAGAGGGGCCCCTATAA
CTCTCTACGGCTAACCTGAATGGACTACGACATAGTCTAGTCCGCCAAGATATCGGCGCGCCGTT
TAAACGGCCGGCCTTAATTAAGTAACGATACAGCAGCAATTGGCAAGCTGCTTACATAGAACTCG
CGGCGATTGGCATGCCGCTTTAAAATTTTTATTTTATTTTTCTTTTCTTTTCCGAATCGGATTTT
GTTTTTAATATTTCAAAAAAAAAAAAAAAAAAAAAAAAAAAAAAAAAAAAAAACCCCTCTCTAAA
CGGAGGGGTTTTTTTCAGCGTAACTGGACTGGCCACAGTTAGGCGGCCGCGCATGTTCATCATCA
GTAACCCGTATCGTGAGCATCCTCTCTCGTTTCATCGGTATCATTACCTCCATGAACAGAAATCC
CCCTTACACGGAGGCATCAGTGACCAAACAGGAAAAAACCGCCCTTAACATGGCCCGCTTTATCA
GAAGCCAGACATTAACGCTTCTGGAGAAACTCAACGAGCTGGACGCGGATGAACAGGCAGACATC
TGTGAATCGCTTCACGACCACGCTGATGAGCTTTACCGCAGCTGCCTCGCGCGTTTCGGTGATGA
CGGTGAAAACCTCTGACACATGCAGCTCCCGGAGACGGTCACAGCTTGTCTGTAAGCGGATGCCG
GGAGCAGACAAGCCCGTCAGGGCGCGTCAGCGGGTGTTGGCGGGTGTCGGGGCGCAGCCATGACC
CAGTCACGTAGCGATAGCGGAGTGTATACTGGCTTAACTATGCGGCATCAGAGCAGATTGTACTG
AGAGTGCACCATATGCGGTGTGAAATACCGCACAGATGCGTAAGGAGAAAATACCGCATCAGGCG
CTCGCTTCCTCGCTCACTGACTCGCTGCGCTCGGTCGTTCGGCTGCGGCGAGCGGTATCAGCTCA
CTCAAAGGCGGTAATACGGTTATCCACAGAATCAGGGGATAACGCAGGAAAGAACATGTGAGCAA
AAGGCCAGCAAAAGGCCAGGAACCGTAAAAAGGCCGCGTTGCTGGCGTTTTTCCATAGGCTCCGC
CCCCCTGACGAGCATCACAAAAATCGACGCTCAAGTCAGAGGTGGCGAAACCCGACAGGACTATA
AAGATACCAGGCGTTTCCCCCTGGAAGCTCCCTCGTGCGCTCTCCTGTTCCGACCCTGCCGCTTA
CCGGATACCTGTCCGCCTTTCTCCCTTCGGGAAGCGTGGCGCTTTCTCATAGCTCACGCTGTAGG
TATCTCAGTTCGGTGTAGGTCGTTCGCTCCAAGCTGGGCTGTGTGCACGAACCCCCCGTTCAGCC
CGACCGCTGCGCCTTATCCGGTAACTATCGTCTTGAGTCCAACCCGGTAAGACACGACTTATCGC
CACTGGCAGCAGCCACTGGTAACAGGATTAGCAGAGCGAGGTATGTAGGCGGTGCTACAGAGTTC
TTGAAGTGGTGGCCTAACTACGGCTACACTAGAAGGACAGTATTTGGTATCTGCGCTCTGCTGAA
GCCAGTTACCTTCGGAAAAAGAGTTGGTAGCTCTTGATCCGGCAAACAAACCACCGCTGGTAGCG
GTGGTTTTTTTGTTTGCAAGCAGCAGATTACGCGCAGAAAAAAAGGATCTCAAGAAGATCCTTTG
ATCTTTTCTACGGGGTCTGACGCTCAGTGGAACGAAAACTCACGTTAAGGGATTTTGGTCATGAG
ATTATCAAAAAGGATCTTCACCTAGATCCTTTTAAATTAAAAATGAAGTTTTAAATCAATCTAAA
GTATATATGAGTAAACTTGGTCTGACAGTTATTAGAAAAATTCATCCAGCAGACGATAAAACGCA
ATACGCTGGCTATCCGGTGCCGCAATGCCATACAGCACCAGAAAACGATCCGCCCATTCGCCGCC
CAGTTCTTCCGCAATATCACGGGTGGCCAGCGCAATATCCTGATAACGATCCGCCACGCCCAGAC
GGCCGCAATCAATAAAGCCGCTAAAACGGCCATTTTCCACCATAATGTTCGGCAGGCACGCATCA
CCATGGGTCACCACCAGATCTTCGCCATCCGGCATGCTCGCTTTCAGACGCGCAAACAGCTCTGC
CGGTGCCAGGCCCTGATGTTCTTCATCCAGATCATCCTGATCCACCAGGCCCGCTTCCATACGGG
TACGCGCACGTTCAATACGATGTTTCGCCTGATGATCAAACGGACAGGTCGCCGGGTCCAGGGTA
TGCAGACGACGCATGGCATCCGCCATAATGCTCACTTTTTCTGCCGGCGCCAGATGGCTAGACAG
CAGATCCTGACCCGGCACTTCGCCCAGCAGCAGCCAATCACGGCCCGCTTCGGTCACCACATCCA
GCACCGCCGCACACGGAACACCGGTGGTGGCCAGCCAGCTCAGACGCGCCGCTTCATCCTGCAGC
TCGTTCAGCGCACCGCTCAGATCGGTTTTCACAAACAGCACCGGACGACCCTGCGCGCTCAGACG
AAACACCGCCGCATCAGAGCAGCCAATGGTCTGCTGCGCCCAATCATAGCCAAACAGACGTTCCA
CCCACGCTGCCGGGCTACCCGCATGCAGGCCATCCTGTTCAATCATACTCTTCCTTTTTCAATAT
TATTGAAGCATTTATCAGGGTTATTGTCTCATGAGCGGATACATATTTGAATGTATTTAGAAAAA
TAAACAAATAGGGGTTCCGCGCACATTTCCCCGAAAAGTGCCACCTGACGTCTAAGAAACCATTA
TTATCATGACATTAAGCATCCGCCTTTCGTTTTATTTGACCATGTTGGTATG
T7 terminator
SEQ ID NO: 982
AACCCCTCTCTAAACGGAGGGGTTTTTTT
AmpR promoter
SEQ ID NO: 983
CGCGGAACCCCTATTTGTTTATTTTTCTAAATACATTCAAATATGTATCCGCTCATGAGACAATA
ACCCTGATAAATGCTTCAATAATATTGAAAAAGGAAGAGT
26S promoter
SEQ ID NO: 984
CTCTCTACGGCTAACCTGAATGGA
T7 promoter
SEQ ID NO: 985
TAATACGACTCACTATAG
Poly A site
SEQ ID NO: 986
AAAAAAAAAAAAAAAAAAAAAAAAAAAAAAAAAAAAAAA
Alpha 5′ replication sequence from nsP1
SEQ ID NO: 987
TAGGAGAAAGTTCACGTTGACATCGAGGAAGACAGCCCATTCCTCAGAGCTTTGCAGCGGAGCTT
CCCGCAGTTTGAGGTAGAAGCCAAGCAGGTCACTGATAATGACCATGCTAATGCCAGAGCGTTTT
CGCATCTGGCTTCAAAACTGATCGAAACGGAGGTGGACCCATCCGACACGATCCTTGACATTGGA
DLP
SEQ ID NO: 988
ATAGTCAGCATAGTACATTTCATCTGACTAATACTACAACACCACCACCATGAATAGAGGATTCT
TTAACATGCTCGGCCGCCGCCCCTTCCCGGCCCCCACTGCCATGTGGAGGCCGCGGAGAAGGAGG
CAGGCGGCCCCG
P2A
SEQ ID NO: 989
GGAAGCGGAGCTACTAACTTCAGCCTGCTGAAGCAGGCTGGAGACGTGGAGGAGAACCCTGGACC
T
Bon
SEQ ID NO: 990
CGCAGCCATGACCCAGTCACGTAGCGATAGCGGAGTGTATACTGGCTTAACTATGCGGCATCAGA
GCAGATTGTACTGAGAGTGCACCATATGCGGTGTGAAATACCGCACAGATGCGTAAGGAGAAAAT
ACCGCATCAGG
DLP nsp ORF
SEQ ID NO: 991
ATGAATAGAGGATTCTTTAACATGCTCGGCCGCCGCCCCTTCCCGGCCCCCACTGCCATGTGGAG
GCCGCGGAGAAGGAGGCAGGCGGCCCCGGGAAGCGGAGCTACTAACTTCAGCCTGCTGAAGCAGG
CTGGAGACGTGGAGGAGAACCCTGGACCTGAGAAAGTTCACGTTGACATCGAGGAAGACAGCCCA
TTCCTCAGAGCTTTGCAGCGGAGCTTCCCGCAGTTTGAGGTAGAAGCCAAGCAGGTCACTGATAA
TGACCATGCTAATGCCAGAGCGTTTTCGCATCTGGCTTCAAAACTGATCGAAACGGAGGTGGACC
CATCCGACACGATCCTTGACATTGGAAGTGCGCCCGCCCGCAGAATGTATTCTAAGCACAAGTAT
CATTGTATCTGTCCGATGAGATGTGCGGAAGATCCGGACAGATTGTATAAGTATGCAACTAAGCT
GAAGAAAAACTGTAAGGAAATAACTGATAAGGAATTGGACAAGAAAATGAAGGAGCTCGCCGCCG
TCATGAGCGACCCTGACCTGGAAACTGAGACTATGTGCCTCCACGACGACGAGTCGTGTCGCTAC
GAAGGGCAAGTCGCTGTTTACCAGGATGTATACGCGGTTGACGGACCGACAAGTCTCTATCACCA
AGCCAATAAGGGAGTTAGAGTCGCCTACTGGATAGGCTTTGACACCACCCCTTTTATGTTTAAGA
ACTTGGCTGGAGCATATCCATCATACTCTACCAACTGGGCCGACGAAACCGTGTTAACGGCTCGT
AACATAGGCCTATGCAGCTCTGACGTTATGGAGCGGTCACGTAGAGGGATGTCCATTCTTAGAAA
GAAGTATTTGAAACCATCCAACAATGTTCTATTCTCTGTTGGCTCGACCATCTACCACGAGAAGA
GGGACTTACTGAGGAGCTGGCACCTGCCGTCTGTATTTCACTTACGTGGCAAGCAAAATTACACA
TGTCGGTGTGAGACTATAGTTAGTTGCGACGGGTACGTCGTTAAAAGAATAGCTATCAGTCCAGG
CCTGTATGGGAAGCCTTCAGGCTATGCTGCTACGATGCACCGCGAGGGATTCTTGTGCTGCAAAG
TGACAGACACATTGAACGGGGAGAGGGTCTCTTTTCCCGTGTGCACGTATGTGCCAGCTACATTG
TGTGACCAAATGACTGGCATACTGGCAACAGATGTCAGTGCGGACGACGCGCAAAAACTGCTGGT
TGGGCTCAACCAGCGTATAGTCGTCAACGGTCGCACCCAGAGAAACACCAATACCATGAAAAATT
ACCTTTTGCCCGTAGTGGCCCAGGCATTTGCTAGGTGGGCAAAGGAATATAAGGAAGATCAAGAA
GATGAAAGGCCACTAGGACTACGAGATAGACAGTTAGTCATGGGGTGTTGTTGGGCTTTTAGAAG
GCACAAGATAACATCTATTTATAAGCGCCCGGATACCCAAACCATCATCAAAGTGAACAGCGATT
TCCACTCATTCGTGCTGCCCAGGATAGGCAGTAACACATTGGAGATCGGGCTGAGAACAAGAATC
AGGAAAATGTTAGAGGAGCACAAGGAGCCGTCACCTCTCATTACCGCCGAGGACGTACAAGAAGC
TAAGTGCGCAGCCGATGAGGCTAAGGAGGTGCGTGAAGCCGAGGAGTTGCGCGCAGCTCTACCAC
CTTTGGCAGCTGATGTTGAGGAGCCCACTCTGGAAGCCGATGTCGACTTGATGTTACAAGAGGCT
GGGGCCGGCTCAGTGGAGACACCTCGTGGCTTGATAAAGGTTACCAGCTACGATGGCGAGGACAA
GATCGGCTCTTACGCTGTGCTTTCTCCGCAGGCTGTACTCAAGAGTGAAAAATTATCTTGCATCC
ACCCTCTCGCTGAACAAGTCATAGTGATAACACACTCTGGCCGAAAAGGGCGTTATGCCGTGGAA
CCATACCATGGTAAAGTAGTGGTGCCAGAGGGACATGCAATACCCGTCCAGGACTTTCAAGCTCT
GAGTGAAAGTGCCACCATTGTGTACAACGAACGTGAGTTCGTAAACAGGTACCTGCACCATATTG
CCACACATGGAGGAGCGCTGAACACTGATGAAGAATATTACAAAACTGTCAAGCCCAGCGAGCAC
GACGGCGAATACCTGTACGACATCGACAGGAAACAGTGCGTCAAGAAAGAACTAGTCACTGGGCT
AGGGCTCACAGGCGAGCTGGTGGATCCTCCCTTCCATGAATTCGCCTACGAGAGTCTGAGAACAC
GACCAGCCGCTCCTTACCAAGTACCAACCATAGGGGTGTATGGCGTGCCAGGATCAGGCAAGTCT
GGCATCATTAAAAGCGCAGTCACCAAAAAAGATCTAGTGGTGAGCGCCAAGAAAGAAAACTGTGC
AGAAATTATAAGGGACGTCAAGAAAATGAAAGGGCTGGACGTCAATGCCAGAACTGTGGACTCAG
TGCTCTTGAATGGATGCAAACACCCCGTAGAGACCCTGTATATTGACGAAGCTTTTGCTTGTCAT
GCAGGTACTCTCAGAGCGCTCATAGCCATTATAAGACCTAAAAAGGCAGTGCTCTGCGGGGATCC
CAAACAGTGCGGTTTTTTTAACATGATGTGCCTGAAAGTGCATTTTAACCACGAGATTTGCACAC
AAGTCTTCCACAAAAGCATCTCTCGCCGTTGCACTAAATCTGTGACTTCGGTCGTCTCAACCTTG
TTTTACGACAAAAAAATGAGAACGACGAATCCGAAAGAGACTAAGATTGTGATTGACACTACCGG
CAGTACCAAACCTAAGCAGGACGATCTCATTCTCACTTGTTTCAGAGGGTGGGTGAAGCAGTTGC
AAATAGATTACAAAGGCAACGAAATAATGACGGCAGCTGCCTCTCAAGGGCTGACCCGTAAAGGT
GTGTATGCCGTTCGGTACAAGGTGAATGAAAATCCTCTGTACGCACCCACCTCTGAACATGTGAA
CGTCCTACTGACCCGCACGGAGGACCGCATCGTGTGGAAAACACTAGCCGGCGACCCATGGATAA
AAACACTGACTGCCAAGTACCCTGGGAATTTCACTGCCACGATAGAGGAGTGGCAAGCAGAGCAT
GATGCCATCATGAGGCACATCTTGGAGAGACCGGACCCTACCGACGTCTTCCAGAATAAGGCAAA
CGTGTGTTGGGCCAAGGCTTTAGTGCCGGTGCTGAAGACCGCTGGCATAGACATGACCACTGAAC
AATGGAACACTGTGGATTATTTTGAAACGGACAAAGCTCACTCAGCAGAGATAGTATTGAACCAA
CTATGCGTGAGGTTCTTTGGACTCGATCTGGACTCCGGTCTATTTTCTGCACCCACTGTTCCGTT
ATCCATTAGGAATAATCACTGGGATAACTCCCCGTCGCCTAACATGTACGGGCTGAATAAAGAAG
TGGTCCGTCAGCTCTCTCGCAGGTACCCACAACTGCCTCGGGCAGTTGCCACTGGAAGAGTCTAT
GACATGAACACTGGTACACTGCGCAATTATGATCCGCGCATAAACCTAGTACCTGTAAACAGAAG
ACTGCCTCATGCTTTAGTCCTCCACCATAATGAACACCCACAGAGTGACTTTTCTTCATTCGTCA
GCAAATTGAAGGGCAGAACTGTCCTGGTGGTCGGGGAAAAGTTGTCCGTCCCAGGCAAAATGGTT
GACTGGTTGTCAGACCGGCCTGAGGCTACCTTCAGAGCTCGGCTGGATTTAGGCATCCCAGGTGA
TGTGCCCAAATATGACATAATATTTGTTAATGTGAGGACCCCATATAAATACCATCACTATCAGC
AGTGTGAAGACCATGCCATTAAGCTTAGCATGTTGACCAAGAAAGCTTGTCTGCATCTGAATCCC
GGCGGAACCTGTGTCAGCATAGGTTATGGTTACGCTGACAGGGCCAGCGAAAGCATCATTGGTGC
TATAGCGCGGCAGTTCAAGTTTTCCCGGGTATGCAAACCGAAATCCTCACTTGAAGAGACGGAAG
TTCTGTTTGTATTCATTGGGTACGATCGCAAGGCCCGTACGCACAATCCTTACAAGCTTTCATCA
ACCTTGACCAACATTTATACAGGTTCCAGACTCCACGAAGCCGGATGTGCACCCTCATATCATGT
GGTGCGAGGGGATATTGCCACGGCCACCGAAGGAGTGATTATAAATGCTGCTAACAGCAAAGGAC
AACCTGGCGGAGGGGTGTGCGGAGCGCTGTATAAGAAATTCCCGGAAAGCTTCGATTTACAGCCG
ATCGAAGTAGGAAAAGCGCGACTGGTCAAAGGTGCAGCTAAACATATCATTCATGCCGTAGGACC
AAACTTCAACAAAGTTTCGGAGGTTGAAGGTGACAAACAGTTGGCAGAGGCTTATGAGTCCATCG
CTAAGATTGTCAACGATAACAATTACAAGTCAGTAGCGATTCCACTGTTGTCCACCGGCATCTTT
TCCGGGAACAAAGATCGACTAACCCAATCATTGAACCATTTGCTGACAGCTTTAGACACCACTGA
TGCAGATGTAGCCATATACTGCAGGGACAAGAAATGGGAAATGACTCTCAAGGAAGCAGTGGCTA
GGAGAGAAGCAGTGGAGGAGATATGCATATCCGACGACTCTTCAGTGACAGAACCTGATGCAGAG
CTGGTGAGGGTGCATCCGAAGAGTTCTTTGGCTGGAAGGAAGGGCTACAGCACAAGCGATGGCAA
AACTTTCTCATATTTGGAAGGGACCAAGTTTCACCAGGCGGCCAAGGATATAGCAGAAATTAATG
CCATGTGGCCCGTTGCAACGGAGGCCAATGAGCAGGTATGCATGTATATCCTCGGAGAAAGCATG
AGCAGTATTAGGTCGAAATGCCCCGTCGAAGAGTCGGAAGCCTCCACACCACCTAGCACGCTGCC
TTGCTTGTGCATCCATGCCATGACTCCAGAAAGAGTACAGCGCCTAAAAGCCTCACGTCCAGAAC
AAATTACTGTGTGCTCATCCTTTCCATTGCCGAAGTATAGAATCACTGGTGTGCAGAAGATCCAA
TGCTCCCAGCCTATATTGTTCTCACCGAAAGTGCCTGCGTATATTCATCCAAGGAAGTATCTCGT
GGAAACACCACCGGTAGACGAGACTCCGGAGCCATCGGCAGAGAACCAATCCACAGAGGGGACAC
CTGAACAACCACCACTTATAACCGAGGATGAGACCAGGACTAGAACGCCTGAGCCGATCATCATC
GAAGAGGAAGAAGAGGATAGCATAAGTTTGCTGTCAGATGGCCCGACCCACCAGGTGCTGCAAGT
CGAGGCAGACATTCACGGGCCGCCCTCTGTATCTAGCTCATCCTGGTCCATTCCTCATGCATCCG
ACTTTGATGTGGACAGTTTATCCATACTTGACACCCTGGAGGGAGCTAGCGTGACCAGCGGGGCA
ACGTCAGCCGAGACTAACTCTTACTTCGCAAAGAGTATGGAGTTTCTGGCGCGACCGGTGCCTGC
GCCTCGAACAGTATTCAGGAACCCTCCACATCCCGCTCCGCGCACAAGAACACCGTCACTTGCAC
CCAGCAGGGCCTGCTCGAGAACCAGCCTAGTTTCCACCCCGCCAGGCGTGAATAGGGTGATCACT
AGAGAGGAGCTCGAGGCGCTTACCCCGTCACGCACTCCTAGCAGGTCGGTCTCGAGAACCAGCCT
GGTCTCCAACCCGCCAGGCGTAAATAGGGTGATTACAAGAGAGGAGTTTGAGGCGTTCGTAGCAC
AACAACAATGA
NsP2
SEQ ID NO: 992
GGCTCAGTGGAGACACCTCGTGGCTTGATAAAGGTTACCAGCTACGATGGCGAGGACAAGATCGG
CTCTTACGCTGTGCTTTCTCCGCAGGCTGTACTCAAGAGTGAAAAATTATCTTGCATCCACCCTC
TCGCTGAACAAGTCATAGTGATAACACACTCTGGCCGAAAAGGGCGTTATGCCGTGGAACCATAC
CATGGTAAAGTAGTGGTGCCAGAGGGACATGCAATACCCGTCCAGGACTTTCAAGCTCTGAGTGA
AAGTGCCACCATTGTGTACAACGAACGTGAGTTCGTAAACAGGTACCTGCACCATATTGCCACAC
ATGGAGGAGCGCTGAACACTGATGAAGAATATTACAAAACTGTCAAGCCCAGCGAGCACGACGGC
GAATACCTGTACGACATCGACAGGAAACAGTGCGTCAAGAAAGAACTAGTCACTGGGCTAGGGCT
CACAGGCGAGCTGGTGGATCCTCCCTTCCATGAATTCGCCTACGAGAGTCTGAGAACACGACCAG
CCGCTCCTTACCAAGTACCAACCATAGGGGTGTATGGCGTGCCAGGATCAGGCAAGTCTGGCATC
ATTAAAAGCGCAGTCACCAAAAAAGATCTAGTGGTGAGCGCCAAGAAAGAAAACTGTGCAGAAAT
TATAAGGGACGTCAAGAAAATGAAAGGGCTGGACGTCAATGCCAGAACTGTGGACTCAGTGCTCT
TGAATGGATGCAAACACCCCGTAGAGACCCTGTATATTGACGAAGCTTTTGCTTGTCATGCAGGT
ACTCTCAGAGCGCTCATAGCCATTATAAGACCTAAAAAGGCAGTGCTCTGCGGGGATCCCAAACA
GTGCGGTTTTTTTAACATGATGTGCCTGAAAGTGCATTTTAACCACGAGATTTGCACACAAGTCT
TCCACAAAAGCATCTCTCGCCGTTGCACTAAATCTGTGACTTCGGTCGTCTCAACCTTGTTTTAC
GACAAAAAAATGAGAACGACGAATCCGAAAGAGACTAAGATTGTGATTGACACTACCGGCAGTAC
CAAACCTAAGCAGGACGATCTCATTCTCACTTGTTTCAGAGGGTGGGTGAAGCAGTTGCAAATAG
ATTACAAAGGCAACGAAATAATGACGGCAGCTGCCTCTCAAGGGCTGACCCGTAAAGGTGTGTAT
GCCGTTCGGTACAAGGTGAATGAAAATCCTCTGTACGCACCCACCTCTGAACATGTGAACGTCCT
ACTGACCCGCACGGAGGACCGCATCGTGTGGAAAACACTAGCCGGCGACCCATGGATAAAAACAC
TGACTGCCAAGTACCCTGGGAATTTCACTGCCACGATAGAGGAGTGGCAAGCAGAGCATGATGCC
ATCATGAGGCACATCTTGGAGAGACCGGACCCTACCGACGTCTTCCAGAATAAGGCAAACGTGTG
TTGGGCCAAGGCTTTAGTGCCGGTGCTGAAGACCGCTGGCATAGACATGACCACTGAACAATGGA
ACACTGTGGATTATTTTGAAACGGACAAAGCTCACTCAGCAGAGATAGTATTGAACCAACTATGC
GTGAGGTTCTTTGGACTCGATCTGGACTCCGGTCTATTTTCTGCACCCACTGTTCCGTTATCCAT
TAGGAATAATCACTGGGATAACTCCCCGTCGCCTAACATGTACGGGCTGAATAAAGAAGTGGTCC
GTCAGCTCTCTCGCAGGTACCCACAACTGCCTCGGGCAGTTGCCACTGGAAGAGTCTATGACATG
AACACTGGTACACTGCGCAATTATGATCCGCGCATAAACCTAGTACCTGTAAACAGAAGACTGCC
TCATGCTTTAGTCCTCCACCATAATGAACACCCACAGAGTGACTTTTCTTCATTCGTCAGCAAAT
TGAAGGGCAGAACTGTCCTGGTGGTCGGGGAAAAGTTGTCCGTCCCAGGCAAAATGGTTGACTGG
TTGTCAGACCGGCCTGAGGCTACCTTCAGAGCTCGGCTGGATTTAGGCATCCCAGGTGATGTGCC
CAAATATGACATAATATTTGTTAATGTGAGGACCCCATATAAATACCATCACTATCAGCAGTGTG
AAGACCATGCCATTAAGCTTAGCATGTTGACCAAGAAAGCTTGTCTGCATCTGAATCCCGGCGGA
ACCTGTGTCAGCATAGGTTATGGTTACGCTGACAGGGCCAGCGAAAGCATCATTGGTGCTATAGC
GCGGCAGTTCAAGTTTTCCCGGGTATGCAAACCGAAATCCTCACTTGAAGAGACGGAAGTTCTGT
TTGTATTCATTGGGTACGATCGCAAGGCCCGTACGCACAATCCTTACAAGCTTTCATCAACCTTG
ACCAACATTTATACAGGTTCCAGACTCCACGAAGCCGGATGT
nsP4
SEQ ID NO: 993
TACATCTTTTCCTCCGACACCGGTCAAGGGCATTTACAACAAAAATCAGTAAGGCAAACGGTGCT
ATCCGAAGTGGTGTTGGAGAGGACCGAATTGGAGATTTCGTATGCCCCGCGCCTCGACCAAGAAA
AAGAAGAATTACTACGCAAGAAATTACAGTTAAATCCCACACCTGCTAACAGAAGCAGATACCAG
TCCAGGAAGGTGGAGAACATGAAAGCCATAACAGCTAGACGTATTCTGCAAGGCCTAGGGCATTA
TTTGAAGGCAGAAGGAAAAGTGGAGTGCTACCGAACCCTGCATCCTGTTCCTTTGTATTCATCTA
GTGTGAACCGTGCCTTTTCAAGCCCCAAGGTCGCAGTGGAAGCCTGTAACGCCATGTTGAAAGAG
AACTTTCCGACTGTGGCTTCTTACTGTATTATTCCAGAGTACGATGCCTATTTGGACATGGTTGA
CGGAGCTTCATGCTGCTTAGACACTGCCAGTTTTTGCCCTGCAAAGCTGCGCAGCTTTCCAAAGA
AACACTCCTATTTGGAACCCACAATACGATCGGCAGTGCCTTCAGCGATCCAGAACACGCTCCAG
AACGTCCTGGCAGCTGCCACAAAAAGAAATTGCAATGTCACGCAAATGAGAGAATTGCCCGTATT
GGATTCGGCGGCCTTTAATGTGGAATGCTTCAAGAAATATGCGTGTAATAATGAATATTGGGAAA
CGTTTAAAGAAAACCCCATCAGGCTTACTGAAGAAAACGTGGTAAATTACATTACCAAATTAAAA
GGACCAAAAGCTGCTGCTCTTTTTGCGAAGACACATAATTTGAATATGTTGCAGGACATACCAAT
GGACAGGTTTGTAATGGACTTAAAGAGAGACGTGAAAGTGACTCCAGGAACAAAACATACTGAAG
AACGGCCCAAGGTACAGGTGATCCAGGCTGCCGATCCGCTAGCAACAGCGTATCTGTGCGGAATC
CACCGAGAGCTGGTTAGGAGATTAAATGCGGTCCTGCTTCCGAACATTCATACACTGTTTGATAT
GTCGGCTGAAGACTTTGACGCTATTATAGCCGAGCACTTCCAGCCTGGGGATTGTGTTCTGGAAA
CTGACATCGCGTCGTTTGATAAAAGTGAGGACGACGCCATGGCTCTGACCGCGTTAATGATTCTG
GAAGACTTAGGTGTGGACGCAGAGCTGTTGACGCTGATTGAGGCGGCTTTCGGCGAAATTTCATC
AATACATTTGCCCACTAAAACTAAATTTAAATTCGGAGCCATGATGAAATCTGGAATGTTCCTCA
CACTGTTTGTGAACACAGTCATTAACATTGTAATCGCAAGCAGAGTGTTGAGAGAACGGCTAACC
GGATCACCATGTGCAGCATTCATTGGAGATGACAATATCGTGAAAGGAGTCAAATCGGACAAATT
AATGGCAGACAGGTGCGCCACCTGGTTGAATATGGAAGTCAAGATTATAGATGCTGTGGTGGGCG
AGAAAGCGCCTTATTTCTGTGGAGGGTTTATTTTGTGTGACTCCGTGACCGGCACAGCGTGCCGT
GTGGCAGACCCCCTAAAAAGGCTGTTTAAGCTTGGCAAACCTCTGGCAGCAGACGATGAACATGA
TGATGACAGGAGAAGGGCATTGCATGAAGAGTCAACACGCTGGAACCGAGTGGGTATTCTTTCAG
AGCTGTGCAAGGCAGTAGAATCAAGGTATGAAACCGTAGGAACTTCCATCATAGTTATGGCCATG
ACTACTCTAGCTAGCAGTGTTAAATCATTCAGCTACCTGAGAGGGGCCCCTATAACTCTCTACGG
C
nsP3
SEQ ID NO: 994
GCACCCTCATATCATGTGGTGCGAGGGGATATTGCCACGGCCACCGAAGGAGTGATTATAAATGC
TGCTAACAGCAAAGGACAACCTGGCGGAGGGGTGTGCGGAGCGCTGTATAAGAAATTCCCGGAAA
GCTTCGATTTACAGCCGATCGAAGTAGGAAAAGCGCGACTGGTCAAAGGTGCAGCTAAACATATC
ATTCATGCCGTAGGACCAAACTTCAACAAAGTTTCGGAGGTTGAAGGTGACAAACAGTTGGCAGA
GGCTTATGAGTCCATCGCTAAGATTGTCAACGATAACAATTACAAGTCAGTAGCGATTCCACTGT
TGTCCACCGGCATCTTTTCCGGGAACAAAGATCGACTAACCCAATCATTGAACCATTTGCTGACA
GCTTTAGACACCACTGATGCAGATGTAGCCATATACTGCAGGGACAAGAAATGGGAAATGACTCT
CAAGGAAGCAGTGGCTAGGAGAGAAGCAGTGGAGGAGATATGCATATCCGACGACTCTTCAGTGA
CAGAACCTGATGCAGAGCTGGTGAGGGTGCATCCGAAGAGTTCTTTGGCTGGAAGGAAGGGCTAC
AGCACAAGCGATGGCAAAACTTTCTCATATTTGGAAGGGACCAAGTTTCACCAGGCGGCCAAGGA
TATAGCAGAAATTAATGCCATGTGGCCCGTTGCAACGGAGGCCAATGAGCAGGTATGCATGTATA
TCCTCGGAGAAAGCATGAGCAGTATTAGGTCGAAATGCCCCGTCGAAGAGTCGGAAGCCTCCACA
CCACCTAGCACGCTGCCTTGCTTGTGCATCCATGCCATGACTCCAGAAAGAGTACAGCGCCTAAA
AGCCTCACGTCCAGAACAAATTACTGTGTGCTCATCCTTTCCATTGCCGAAGTATAGAATCACTG
GTGTGCAGAAGATCCAATGCTCCCAGCCTATATTGTTCTCACCGAAAGTGCCTGCGTATATTCAT
CCAAGGAAGTATCTCGTGGAAACACCACCGGTAGACGAGACTCCGGAGCCATCGGCAGAGAACCA
ATCCACAGAGGGGACACCTGAACAACCACCACTTATAACCGAGGATGAGACCAGGACTAGAACGC
CTGAGCCGATCATCATCGAAGAGGAAGAAGAGGATAGCATAAGTTTGCTGTCAGATGGCCCGACC
CACCAGGTGCTGCAAGTCGAGGCAGACATTCACGGGCCGCCCTCTGTATCTAGCTCATCCTGGTC
CATTCCTCATGCATCCGACTTTGATGTGGACAGTTTATCCATACTTGACACCCTGGAGGGAGCTA
GCGTGACCAGCGGGGCAACGTCAGCCGAGACTAACTCTTACTTCGCAAAGAGTATGGAGTTTCTG
GCGCGACCGGTGCCTGCGCCTCGAACAGTATTCAGGAACCCTCCACATCCCGCTCCGCGCACAAG
AACACCGTCACTTGCACCCAGCAGGGCCTGCTCGAGAACCAGCCTAGTTTCCACCCCGCCAGGCG
TGAATAGGGTGATCACTAGAGAGGAGCTCGAGGCGCTTACCCCGTCACGCACTCCTAGCAGGTCG
GTCTCGAGAACCAGCCTGGTCTCCAACCCGCCAGGCGTAAATAGGGTGATTACAAGAGAGGAGTT
TGAGGCGTTCGTAGCACAACAACAATGACGGTTTGATGCGGGTGCA
nsP1
SEQ ID NO: 995
GAGAAAGTTCACGTTGACATCGAGGAAGACAGCCCATTCCTCAGAGCTTTGCAGCGGAGCTTCCC
GCAGTTTGAGGTAGAAGCCAAGCAGGTCACTGATAATGACCATGCTAATGCCAGAGCGTTTTCGC
ATCTGGCTTCAAAACTGATCGAAACGGAGGTGGACCCATCCGACACGATCCTTGACATTGGAAGT
GCGCCCGCCCGCAGAATGTATTCTAAGCACAAGTATCATTGTATCTGTCCGATGAGATGTGCGGA
AGATCCGGACAGATTGTATAAGTATGCAACTAAGCTGAAGAAAAACTGTAAGGAAATAACTGATA
AGGAATTGGACAAGAAAATGAAGGAGCTCGCCGCCGTCATGAGCGACCCTGACCTGGAAACTGAG
ACTATGTGCCTCCACGACGACGAGTCGTGTCGCTACGAAGGGCAAGTCGCTGTTTACCAGGATGT
ATACGCGGTTGACGGACCGACAAGTCTCTATCACCAAGCCAATAAGGGAGTTAGAGTCGCCTACT
GGATAGGCTTTGACACCACCCCTTTTATGTTTAAGAACTTGGCTGGAGCATATCCATCATACTCT
ACCAACTGGGCCGACGAAACCGTGTTAACGGCTCGTAACATAGGCCTATGCAGCTCTGACGTTAT
GGAGCGGTCACGTAGAGGGATGTCCATTCTTAGAAAGAAGTATTTGAAACCATCCAACAATGTTC
TATTCTCTGTTGGCTCGACCATCTACCACGAGAAGAGGGACTTACTGAGGAGCTGGCACCTGCCG
TCTGTATTTCACTTACGTGGCAAGCAAAATTACACATGTCGGTGTGAGACTATAGTTAGTTGCGA
CGGGTACGTCGTTAAAAGAATAGCTATCAGTCCAGGCCTGTATGGGAAGCCTTCAGGCTATGCTG
CTACGATGCACCGCGAGGGATTCTTGTGCTGCAAAGTGACAGACACATTGAACGGGGAGAGGGTC
TCTTTTCCCGTGTGCACGTATGTGCCAGCTACATTGTGTGACCAAATGACTGGCATACTGGCAAC
AGATGTCAGTGCGGACGACGCGCAAAAACTGCTGGTTGGGCTCAACCAGCGTATAGTCGTCAACG
GTCGCACCCAGAGAAACACCAATACCATGAAAAATTACCTTTTGCCCGTAGTGGCCCAGGCATTT
GCTAGGTGGGCAAAGGAATATAAGGAAGATCAAGAAGATGAAAGGCCACTAGGACTACGAGATAG
ACAGTTAGTCATGGGGTGTTGTTGGGCTTTTAGAAGGCACAAGATAACATCTATTTATAAGCGCC
CGGATACCCAAACCATCATCAAAGTGAACAGCGATTTCCACTCATTCGTGCTGCCCAGGATAGGC
AGTAACACATTGGAGATCGGGCTGAGAACAAGAATCAGGAAAATGTTAGAGGAGCACAAGGAGCC
GTCACCTCTCATTACCGCCGAGGACGTACAAGAAGCTAAGTGCGCAGCCGATGAGGCTAAGGAGG
TGCGTGAAGCCGAGGAGTTGCGCGCAGCTCTACCACCTTTGGCAGCTGATGTTGAGGAGCCCACT
CTGGAAGCCGATGTCGACTTGATGTTACAAGAGGCTGGGGCC
KanR
SEQ ID NO: 996
ATGATTGAACAGGATGGCCTGCATGCGGGTAGCCCGGCAGCGTGGGTGGAACGTCTGTTTGGCTA
TGATTGGGCGCAGCAGACCATTGGCTGCTCTGATGCGGCGGTGTTTCGTCTGAGCGCGCAGGGTC
GTCCGGTGCTGTTTGTGAAAACCGATCTGAGCGGTGCGCTGAACGAGCTGCAGGATGAAGCGGCG
CGTCTGAGCTGGCTGGCCACCACCGGTGTTCCGTGTGCGGCGGTGCTGGATGTGGTGACCGAAGC
GGGCCGTGATTGGCTGCTGCTGGGCGAAGTGCCGGGTCAGGATCTGCTGTCTAGCCATCTGGCGC
CGGCAGAAAAAGTGAGCATTATGGCGGATGCCATGCGTCGTCTGCATACCCTGGACCCGGCGACC
TGTCCGTTTGATCATCAGGCGAAACATCGTATTGAACGTGCGCGTACCCGTATGGAAGCGGGCCT
GGTGGATCAGGATGATCTGGATGAAGAACATCAGGGCCTGGCACCGGCAGAGCTGTTTGCGCGTC
TGAAAGCGAGCATGCCGGATGGCGAAGATCTGGTGGTGACCCATGGTGATGCGTGCCTGCCGAAC
ATTATGGTGGAAAATGGCCGTTTTAGCGGCTTTATTGATTGCGGCCGTCTGGGCGTGGCGGATCG
TTATCAGGATATTGCGCTGGCCACCCGTGATATTGCGGAAGAACTGGGCGGCGAATGGGCGGATC
GTTTTCTGGTGCTGTATGGCATTGCGGCACCGGATAGCCAGCGTATTGCGTTTTATCGTCTGCTG
GATGAATTTTTCTAATAA
Rop
SEQ ID NO: 997
GTGACCAAACAGGAAAAAACCGCCCTTAACATGGCCCGCTTTATCAGAAGCCAGACATTAACGCT
TCTGGAGAAACTCAACGAGCTGGACGCGGATGAACAGGCAGACATCTGTGAATCGCTTCACGACC
ACGCTGATGAGCTTTACCGCAGCTGCCTCGCGCGTTTCGGTGATGACGGTGAAAACCTCTGA
5′-UTR
SEQ ID NO: 998
ATAGGCGGCGCATGAGAGAAGCCCAGACCAATTACCTACCCAAA
3′-UTR
SEQ ID NO: 999
ATACAGCAGCAATTGGCAAGCTGCTTACATAGAACTCGCGGCGATTGGCATGCCGCTTTAAAATT
TTTATTTTATTTTTCTTTTCTTTTCCGAATCGGATTTTGTTTTTAATATTTC

### Example 10. Neoantigens Incorporated into NeoGAd20 and NeoMVA are Immunogenic In Vitro

[0971] Overlapping 15-mer peptides were designed to span each neoantigen incorporated into NeoGAd20 and NeoMVA to assess their ability to activate T cells using the exogenous autologous normal donor restimulation assay described in Example 1 as pools using TNFα and IFNγ production by CD8⁺ and CD4⁺ T cells as a readout. Table 25 shows the maximum frequency of TNFα⁺IFNγ⁺CD8⁺ and TNFα⁺IFNγ⁺CD4⁺ T cells and maximum fold change over negative control for the pool of peptides analyzed, indicating the highest frequency of TNFα⁺IFNγ⁺CD8⁺ and TNFα⁺IFNγ⁺CD4⁺ T cells and resulting fold change across the normal donors evaluated for the peptide. Table 26 shows the peptide sequences used. FIG. 7 shows the number of patients with a positive CD8+ response for each tested peptide pool for select neoantigens. FIG. 8 shows the number of patients with a positive CD4+ response for each tested peptide pool for select neoantigens.

TABLE 25

| | | Maximum | | Maximum |
|---|---|---|---|---|
| | | Frequency | | Frequency |
| | Maximum | of | Maximum | of |
| | Fold | TNFα/IFNγ | Fold | TNFα/IFNγ |
| Neoantigen | Change | Double | Change | Double |
| ID | Over | Positive | Over | Positive |
| (Alternative | Background | CD8+ | Background | CD4+ |
| name) | CD8+ cells | T cells | CD4+ cells | T cells |
| AS18 (C2-NO1) | 9.17 | 0.110 | 7.51 | 0.053 |
| P87 (C2-NO4) | 9.20 | 0.460 | 7.86 | 0.110 |
| AS55 (C2-NO5) | 1354.17 | 32.500 | 19.38 | 0.310 |
| AS57 (C2-NO6) | 4.67 | 0.056 | 11.00 | 0.110 |
| AS15 (C2-NO11) | 4.36 | 0.061 | 9.17 | 0.110 |
| AS7 (C2-NO13) | 52.60 | 2.630 | 2.50 | 0.045 |
| AS43 (C2-NO15) | 28.75 | 0.460 | 5.67 | 0.040 |
| AS51 (C2-NO17) | 33.13 | 0.530 | 8.75 | 0.140 |
| AS16 (C2-NO19) | 24.17 | 0.290 | 7.78 | 0.140 |
| AS41 (C2-NO20) | 190.60 | 9.530 | 2.20 | 0.022 |
| AS6 (C2-NO22) | 6.50 | 0.078 | 31.67 | 0.380 |
| AS3 (C2-NO23) | 7.92 | 0.095 | 3.86 | 0.054 |
| AS11 | 5.11 | 0.07 | 2.98 | 0.03 |
| AS13 | 1.67 | 0.10 | 1.96 | 0.05 |
| AS47 (C2-NO30) | 4.80 | 0.240 | 2.58 | 0.031 |
| AS8 (C2-NO33) | 54.55 | 0.600 | 4.08 | 0.049 |
| AS19 | 5.87 | 0.63 | 2.59 | 0.1 |
| AS37 | 19.47 | 0.74 | 7.51 | 0.04 |
| AS23 | 3.24 | 0.07 | 5.08 | 0.01 |
| MS1 | 5.56 | 0.1 | 50.19 | 0.39 |
| MS3 | 36.15 | 0.47 | 13.61 | 0.09 |
| MS6 | 4.17 | 0.08 | 111.97 | 0.87 |
| MS8 | 4.44 | 0.14 | 15.60 | 0.40 |
| P82 | 2.92 | 0.09 | 4.44 | 0.17 |
| P16 (C2-NO8) | 2.44 | 0.039 | 2.44 | 0.039 |
| FUS1 (C2-NO9) | 1.94 | 0.031 | 8.33 | 0.100 |
| P22 (C2-NO10) | 1.56 | 0.025 | 18.16 | 0.075 |
| FUS2 (C2-NO14) | 3.13 | 0.05 | 2.14 | 0.03 |
| FUS3 (C2-NO21) | 3.94 | 0.063 | 2.75 | 0.033 |
| FUS6 (C2-NO28) | 3.50 | 0.056 | 2.27 | 0.016 |
| FUS5 (C2-NO32) | 32.50 | 0.390 | 3.43 | 0.048 |
| FUS8 | 1.89 | 0.08 | 7.15 | 0.04 |
| FUS15 (C2-NO35) | 1.75 | 0.028 | 2.79 | 0.039 |
| P35 | 14.44 | 0.26 | 3.47 | 0.03 |
| FUS19(C2-NO37) | 1.88 | 0.030 | 3.15 | 0.013 |
| FUS7 | 8.89 | 0.16 | 36.13 | 0.04 |
| M84 | 1.39 | 0.03 | 35.84 | 0.31 |
| M86 | 4.22 | 0.08 | 6.18 | 0.05 |
| M10 | 1.89 | 0.09 | 14.14 | 0.1 |
| M12 | 6.67 | 0.12 | 8.94 | 0.05 |
| FR1 | 7.92 | 0.38 | 4.89 | 0.04 |

TABLE 26

| Neoantigen ID | Overlapping Peptide Sequences* |
|---|---|
| (alternative name) | (SEQ ID NO:) |
| AS18 (C2-NO1) | WKFEMSYTVGGPPPH (560) |
| | VGGPPPHVHARPRHW (561) |
| | PPHVHARPRHWKTD (562) |
| P87 (C2-NO4) | YEAGMTLGGKILFFL (563) |
| | GKILFFLFLLLPLSP (564) |
| | FFLFLLLPLSPFSLIF (565) |
| AS55 (C2-NO5) | DGHSYTSKVNCLLLQ (566) |
| | VNCLLLQDGFHGCVS (567) |
| | GFHGCVSITGAAGRR (568) |
| | TGAAGRRNLSIFLFL (569) |
| | LSIFLFLMLCKLEFH (570) |
| | LFLMLCKLEFHAC (571) |
| AS57 (C2-NO6) | TGGKSTCSAPGPQSL (572) |
| | APGPQSLPSTPFSTY (573) |
| | STPFSTYPQWVILIT (574) |
| AS15 (C2-NO11) | VLRFLDLKVRYLHS (269) |
| AS7 (C2-NO13) | DYVVAQKEKGSSSFLR (576) |
| | QKEKGSSSFLRPSC (577) |
| AS43 (C2-NO15) | VPFRELKNVSVLEGL (578) |
| | VSVLEGLRQGRLGGP (579) |
| | QGRLGGPCSCHCPRP (580) |
| | SCHCPRPSQARLTPV (581) |
| | QARLTPVDVAGPFLC (582) |
| | VAGPFLCLGDPGLFP (583) |
| | GDPGLFPPVKSSI (584) |
| AS51 (C2-NO17) | GMECTLGQVGAPSPR (585) |
| | VGAPSPRREEDGWRG (586) |
| | EEDGWRGGHSRFKAD (587) |
| | HSRFKADVPAPQGPC (588) |
| | PAPQGPCWGGQPGSA (589) |
| | GGQPGSAPSSAPPEQ (590) |
| | GSAPSSAPPEQSLLD (591) |
| AS16 (C2-NO19) | GNTTLQQLGEASQAP (592) |
| | GEASQAPSGSLIPLR (593) |
| | GSLIPLRLPLLWEVRG (594) |
| AS41 (C2-NO20) | EAFQRAAGEGGPGRG (595) |
| | EGGPGRGGARRGARV (596) |
| | ARRGARVLQSPFCRA (597) |
| | QSPFCRAGAGEWLGH (598) |
| | CRAGAGEWLGHQSLR (599) |
| AS6 (C2-NO22) | DYWAQKEKISIPRTH (600) |
| | QKEKISIPRTHLC (601) |
| AS3 (C2-NO23) | VAMMVPDRQVHYDFG (602) |
| | VPDRQVHYDFGLR (603) |
| AS11 | VPFRELKNQRTAQGA (631) |
| | QRTAQGAPGIHHAAS (632) |
| | GIHHAASPVAANLCD (633) |
| | VAANLCDPARHAQHT (634) |
| | ARGAQGTRIPCGAGQ (635) |
| | IPCGAGQVRAGRGPE (636) |
| | RAGRGPEAGGGVLDP (637) |
| | GGGVLQPQRPAPEKP (638) |
| | RPAPEKPGCPCRRGQ (639) |
| | CPCRRGQPRLHTVKM (640) |
| | RGQPRLHTVKMWRA (641) |
| AS13 | KRSFAVTERII (265) |
| AS47 (C2-NO30) | FKKFDGPCGERGGGR (604) |
| | GERGGGRTARALWAR (605) |
| | ARALWARGDSVLTPA (606) |
| | DSVLTPALDPQTPVR (607) |
| | DPQTPVRAPSLTRAA (608) |
| | PVRAPSLTRAAAAV (609) |
| AS8 (C2-NO33) | LVLGVLSGHSGSRL (255) |
| AS19 | QWQHYHRSGEAAGTP (710) |
| | GEAAGTPLWRPTRN (711) |
| AS37 | CHLFLQPQVGTPPPH (642) |
| | VGTPPPHTASARAPS (643) |
| | ASARAPSGPPHPHES (644) |
| | PPHPHESCPAGRRPA (645) |
| | PAGRRPARAAQTCAR (646) |
| | AAQTCARRQHGLPGC (647) |
| | QHGLPGCEEAGTARV (648) |
| | EAGTARVPSLHLHLH (649) |
| | SLHLHLHQAALGAGR (650) |
| | AALGAGRGRGWGEAC (651) |
| | RGWGEACAQVPPSRG (652) |
| AS23 | KIQNKNCPD (285) |
| MS1 | HYKLIQQPISLFSIT (653) |
| | ISLFSITDRLHKTFS (654) |
| | RLHKTFSQLPSVHLC (655) |
| | LPSVHLCSITFQWGH (656) |
| | ITFQWGHPPIFCSTN (657) |
| | PIFCSTNDICVTANF (658) |
| | ICVTANFCISVTFLK (659) |
| | ISVTFLKPCFLLHEA (660) |
| | CFLLHEASASQ (661) |
| MS3 | RTALTHNQDFSIYRL (662) |
| | DFSIYRLCCKRGSLC (663) |
| | CKRGSLCHASQARSP (664) |
| | ASQARSPAFPKPVRP (665) |
| | FPKPVRPLPAPITRI (666) |
| | PAPITRITPQLGGQS (667) |
| | PQLGGQSDSSQPLLT (668) |
| | SSQPLLTTGRPQGWQ (669) |
| | GRPQGWQDQALRHTQ (670) |
| | QALRHTQQASPASCA (671) |
| | ASPASCATITIPIHS (672) |
| | ITIPIHSAALGDHSG (673) |
| | ALGDHSGDPGPAWDT (674) |
| | PGPAWDTCPPLPLTT (675) |
| | PPLPLTTLIPRAPPP (676) |
| | IPRAPPPYGDSTARS (677) |
| | GDSTARSWPSRCGPLG (678) |
| MS6 | YAYKDFLWCFPFSLV (679) |
| | CFPFSLVFLQEIQIC (680) |
| | LQEIQICCHVSCLCC (681) |
| | HVSCLCCICCSTRIC (682) |
| | CCSTRICLGCLLELF (683) |
| | GCLLELFLSRALRAL (684) |
| | SRALRALHVLWNGFQ (685) |
| | VLWNGFQLHCQ (686) |
| MS8 | TMPAILKLQKNCLLSL (444) |
| P82 | YEAGMTLGEKFRVGN (687) |
| | EKFRVGNCKHLKMTRP (688) |
| P16 (C2-NO8) | GVPGDSTRRAVRRMN (611) |
| | DSTRRAVRRMNTF (612) |
| FUS1 (C2-NO9) | CGASACDVSLIAMDSA (211) |
| | GASACDVSLIAMDSAITLW (1001) |
| P22 (C2-NO10) | SLYHREKQLIAMDSAI (349) |
| | SLYHREKQLIAMDSAITLW (1003) |
| FUS2 | TEYNQKLQVNQFSESK (712) |
| FUS3 (C2-NO21) | TEISCCTLSSEENEY (615) |
| | SSEENEYLPRPEWQLQ (616) |
| FUS6 (C2-NO28) | CEERGAAGSLISCE (221) |
| FUS5 (C2-NO32) | NSKMALNSEALSVVSE (219) |
| FUS8 | WGMELAASRRFSWDH (689) |
| | RRFSWDHHSAGGPPR (690) |
| | SAGGPPRVPSVRSGA (691) |
| | PSVRSGAAQVQPKDP (692) |
| | QVQPKDPLPLRTLAG (693) |
| | PLRTLAGCLARTAHL (694) |
| | LARTAHLRPGAESLP (695) |
| | PGAESLPQPQLHCT (696) |
| FUS15 (C2-NO35) | HVVGYGHLDTSGSSS (619) |
| | YGHLDTSGSSSSSSWP (620) |
| P35 | NSKMALNSLNSIDDA (697) |
| | LNSIDDAQLTRIAPP (698) |
| | LTRIAPPRSHCCFWE (699) |
| | APPRSHCCFWEVNAP (700) |
| FUS19 (C2-NO37) | KMHFSLKEHPPPPCPP (235) |
| FUS7 | LWFQSSELSPTGAPW (701) |
| | SPTGAPWPSRRPTWR (702) |
| | SRRPTWRGTTVSPRT (703) |
| | TTVSPRTATSSARTC (704) |
| | TSSARTCCGTKWPSS (705) |
| | GTKWPSSQEAALGLG (706) |
| | EAALGLGSGLLRFSC (707) |
| | GLLRFSCGTAAIR (708) |
| M84 | IARELHQFAFDLLIKSH (167) |
| M86 | QPDSFAALHSSLNELGE (171) |
| M10 | FVQGKDWGLKKFIRRDF (19) |
| M12 | FVQGKDWGVKKFIRRDF (23) |
| FR1 | QNLQNGGGSRSSATL (709) |
| | SRSSATLPGRRRRRW (575) |
| | GRRRRRWLRRRRQPI (610) |
| | RRRRQPISVAPAGPP (613) |
| | VAPAGPPRRPNQKPN (614) |
| | RPNQKPNPPGGARCV (617) |
| | PGGARCVIMRPTWPG (618) |
| | MRPTWPGTSAFT (621) |

### Example 11 Neoantigens Incorporated into NeoGAd20 and NeoMVA are Immunogenic when Expressed Endogenously In Vitro

[0972] For three of the neoantigens, an Ad5 vector was designed to transduce normal Dendritic cells with the neoantigens. This assay assessed the ability of the endogenously expressed and presented neoantigens to activate autologous T cells following overlapping 15-mer peptide pools restimulation using the endogenous autologous normal donor restimulation assay described in Example 1 utilizing TNFα and IFNγ production by CD8⁺ and CD4⁺ T cells as a readout. Table 27 shows the maximum frequency of TNFα⁺IFNγ⁺CD8⁺ and TNFα⁺IFNγ⁺CD4⁺ T cells and maximum fold change over negative control for the pool of peptides analyzed, indicating the highest frequency of TNFα⁺IFNγ⁺CD8⁺ and TNFα⁺IFNγ⁺CD4⁺ T cells and resulting fold change across the normal donors evaluated for the peptide. Sixteen donors were used to assess endogenous immunogenicity.

TABLE 27

| | | | Maximum | | Maximum |
|---|---|---|---|---|---|
| | | Maximum | Frequency | Maximum | Frequency |
| | | Fold | of | Fold | of |
| | | Change | TNFα/IFNγ | Change | TNFα/IFNγ |
| | Overlapping | Over | Double | Over | Double |
| | Peptide | Background | Positive | Background | Positive |
| Neoantigen | Sequences* (SEQ | CD8+ | CD8+ T | CD4+ | CD4+ T |
| ID | ID NO:) | cells | cells | cells | cells |
| AS18 | WKFEMSYTVGGPPPH (560) | 4.09 | 0.36 | 1.90 | 0.046 |
| (C2-NO1) | VGGPPPHVHARPRHW (561) | | | | |
| | PPHVHARPRHWKTD (562) | | | | |
| P87 (C2- | YEAGMTLGGKILFFL (563) | 2.47 | 0.39 | 2.41 | 0.079 |
| NO4) | GKILFFLFLLLPLSP (564) | | | | |
| | FFLFLLLPLSPFSLIF (565) | | | | |
| AS55 | DGHSYTSKVNCLLLQ (566) | 213.88 | 2.05 | 3.50 | 0.063 |
| (C2- | VNCLLLQDGFHGCVS (567) | | | | |
| NO5) | GFHGCVSITGAAGRR (568) | | | | |
| | TGAAGRRNLSIFLFL (569) | | | | |
| | LSIFLFLMLCKLEFH (570) | | | | |
| | LFLMLCKLEFHAC (571) | | | | |

*All generated peptides had NH2 group at N-terminus and -OH group at C-terminus

### Example 12: Neoantigens are Immunogenic In Vitro

[0973] Immunogenicity of various additional identified neoantigens was assessed. Overlapping 15-mer peptides were designed to span each neoantigen similarly to what was done in Example 11 to assess their ability to activate T cells using the exogenous autologous normal donor restimulation assay described in Example 1 as pools using TNFα and IFNγ production by CD8⁺and CD4⁺ T cells as a readout. Table 28 shows the maximum frequency of TNFα⁺IFNγ⁺CD8⁺ and TNFα⁺IFNγ⁺CD4⁺ T cells and maximum fold change over negative control for the pool of peptides analyzed, indicating the highest frequency of TNFα⁺IFNγ⁺CD8⁺ and TNFα⁺IFNγ⁺CD4⁺ T cells and resulting fold change across the normal donors evaluated for the peptide. Table 29 shows the amino acid sequences of the peptides used in the assays for each neoantigen.

TABLE 28

| | Max. Fold | | Max. Fold | |
|---|---|---|---|---|
| | Change | | Change | |
| | over | | over | |
| | background | Max. | background | Max. |
| | CD8+ | Frequency | CD4+ | Frequency |
| | TNFαINFγ | of | TNFαINFγ | of |
| | double | CD8+ | double | CD4+ |
| Neoantigen ID | positive | TNFαINFγ | positive | TNFαINFγ |
| (Alternative name) | DP | DP | DP | DP |
| AS1 (Misc1-NO12) | 8.15 | 0.11 | 3.57 | 0.02 |
| AS2 (Misc1-NO13) | 5.06 | 0.09 | 110.68 | 0.86 |
| AS4 (Misc1-NO14) | 5.4 | 0.17 | 37.38 | 1.43 |
| AS5 (Misc1-NO15) | 2.13 | 0.16 | 8.71 | 0.1 |
| AS9 (Misc1-NO16) | 3.81 | 0.12 | 4.18 | 0.16 |
| AS10 (Misc1-NO17) | 4.33 | 0.08 | 3.97 | 0.23 |
| AS12 (Misc1-NO18) | 6.03 | 0.19 | 7.32 | 0.28 |
| AS14 (Misc1-NO19) | 3.81 | 0.12 | 1.49 | 0.06 |
| AS17 (Misc1-NO20) | 2.38 | 0.07 | 3.18 | 0.01 |
| AS20 (Misc1-NO21) | 3.81 | 0.12 | 1.36 | 0.05 |
| AS21 (Misc1-NO22) | 3.81 | 0.12 | 1.7 | 0.07 |
| AS22 (Misc1-NO23) | 2.61 | 0.1 | 7.86 | 0.11 |
| AS32 (Misc1-NO24) | 3.81 | 0.12 | 2.04 | 0.08 |
| AS34 (Misc1-NO26) | 16.25 | 0.26 | 9.48 | 0.01 |
| AS35 (Misc1-NO27) | 11.32 | 0.43 | 60.93 | 0.23 |
| AS36 (Misc2-NO1) | 1544.74 | 58.7 | 129.8 | 0.49 |
| AS40 (Misc2-NO3) | 178.52 | 2.41 | 15.34 | 0.89 |
| AS42 (Misc2-NO4) | 4.65 | 0.69 | 24.58 | 0.59 |
| AS44 (Misc2-NO5) | 4.72 | 0.09 | 293.94 | 1.48 |
| AS45 (Misc2-NO6) | 4.96 | 0.07 | 78.51 | 0.61 |
| AS46 (Misc2-NO7) | 11.6 | 0.87 | 157.98 | 0.29 |
| AS48 (Misc2-NO8) | 9.21 | 0.29 | 13.45 | 0.13 |
| AS49 (Misc2-NO9) | 8.67 | 0.65 | 184.87 | 0.14 |
| AS50 (Misc2-NO10) | 1.6 | 0.12 | 17.22 | 0.07 |
| AS52 (Misc2-NO11) | 6.85 | 0.1 | 184.87 | 0.63 |
| AS53 (Misc2-NO12) | 4.02 | 0.35 | 113.91 | 0.43 |
| AS54 | 88.15 | 8.33 | 17.87 | 0.18 |
| AS55.1 (Misc2- | 25.26 | 1.47 | 20.66 | 0.08 |
| NO14) | | | | |
| AS56 | 6.35 | 0.6 | 128.76 | 0.18 |
| AS58 (Misc2-NO16) | 4.54 | 0.6 | 6.27 | 0.24 |
| AS59 (Misc2-NO17) | 4.22 | 0.08 | 59.58 | 0.3 |
| FUS9 (Misc1-NO2) | 1.82 | 0.07 | 203.97 | 0.77 |
| FUS10 (Misc1-NO3) | 2.42 | 0.09 | 10.86 | 0.04 |
| FUS11 (Misc1-NO4) | 2.63 | 0.1 | 28.57 | 0.16 |
| FUS18 | 42.33 | 0.91 | 31.76 | 0.04 |
| FUS23 (Misc1-NO6) | 11.05 | 0.62 | 12.77 | 0.12 |
| FUS24 (Misc1-NO7) | 8.53 | 0.64 | 4.4 | 0.05 |
| MS2 (Excl-NO6) | 36.92 | 0.48 | 15.12 | 0.1 |
| MS4 (Excl-NO8) | 24.13 | 0.76 | 367.35 | 2.43 |
| MS5 (Excl-NO9) | 32.89 | 1.95 | 126.05 | 0.2 |
| MS7 (Excl-NO11) | 6.67 | 0.12 | 10.52 | 0.09 |
| MS9 (Excl-NO13) | 1.38 | 0.1 | 455.63 | 1.72 |
| MS10 (Excl-NO14) | 3.42 | 0.13 | 74.17 | 0.28 |
| MS11 (Excl-NO15) | 3.81 | 0.12 | 3.4 | 0.13 |
| P97 (Misc1-NO11) | 7.47 | 1.11 | 3.14 | 0.12 |
| P19 (Misc1-NO8) | 4.76 | 0.15 | 6.67 | 0.16 |
| P27 (Misc1-NO9) | 7.87 | 0.59 | 45.38 | 0.05 |
| P37 (Misc1-NO10) | 2.05 | 0.13 | 22.78 | 0.09 |
| P76, P77 (Misc2- | 4.56 | 0.08 | 53.18 | 0.36 |
| NO18) | | | | |

TABLE 29

| Neoantigen ID | |
|---|---|
| (Alternative name) | Peptide sequences |
| AS1 (Misc1- | LTFLDFIQVTLRVMS (SEQ ID NO: 377) |
| NO12) | VTLRVMSGSQMENGS (SEQ ID NO: 378) |
| | SQMENGSSYFFKPFS (SEQ ID NO: 415) |
| | YFFKPFSWGLGVGLS (SEQ ID NO: 417) |
| AS2 (Misc1- | FMIGELVGELCCQLT (SEQ ID NO: 418) |
| NO13) | ELCCQLTFRLPFLES (SEQ ID NO: 419) |
| | RLPFLESLCQAVVTQ (SEQ ID NO: 420) |
| | CQAVVTQALRFNPSF (SEQ ID NO: 502) |
| | LRFNPSFQEVCIYQD (SEQ ID NO: 518) |
| | EVCIYQDTDLM (SEQ ID NO: 526) |
| AS4 (Misc1- | WCPLDLRLGSTGCLT (SEQ ID NO: 527) |
| NO14) | GSTGCLTCRHHQTSHE (SEQ ID NO: 714) |
| AS5 (Misc1- | VVGRRHETAPQPLLV (SEQ ID NO: 715) |
| NO15) | APQPLLVPDRAGGEG (SEQ ID NO: 716) |
| | DRAGGEGGA (SEQ ID NO: 717) |
| AS9 (Misc1- | PVPTATPGVRSVTSP (SEQ ID NO: 718) |
| NO16) | VRSVTSPQGLGLFLK (SEQ ID NO: 719) |
| | GLGLFLKFI (SEQ ID NO: 720) |
| AS10 (Misc1- | KENDVREVCDVYLQM (SEQ ID NO: 721) |
| NO17) | CDVYLQMQIFFHFKF (SEQ ID NO: 722) |
| | IFFHFKFRSYFH (SEQ ID NO: 723) |
| AS12 (Misc1- | FARKMLEKVHRQHLQ (SEQ ID NO: 724) |
| NO18) | VHRQHLQLSHNSQE (SEQ ID NO: 725) |
| AS14 (Misc1- | MFLRKEQQVGPHSFS (SEQ ID NO: 726) |
| NO19) | VGPHSFSML (SEQ ID NO: 727) |
| AS17 (Misc1- | GLNLNTDRPGGYSYS (SEQ ID NO: 728) |
| NO20) | PGGYSYSIWWKNNAK (SEQ ID NO: 729) |
| | WWKNNAKNR (SEQ ID NO: 730) |
| AS20 (Misc1- | KVLNEIDAVVTVPPS (SEQ ID NO: 731) |
| NO21) | VVTVPPSLSTSQIPQ (SEQ ID NO: 732) |
| | STSQIPQGCCIIL (SEQ ID NO: 733) |
| AS21 (Misc1- | ANLKGTLQVRSGQAV (SEQ ID NO: 734) |
| NO22) | VRSGQAVSPR (SEQ ID NO: 735) |
| AS22 (Misc1- | LQAAASGQGKQGVPC (SEQ ID NO: 736) |
| NO23) | GKQGVPCPWGCCAYA (SEQ ID NO: 737) |
| | WGCCAYAESPRALIS (SEQ ID NO: 738) |
| | SPRALISGDAPSQVE (SEQ ID NO: 739) |
| | DAPSQVEREVPGPCL (SEQ ID NO: 740) |
| | EVPGPCLNTHSLSHR (SEQ ID NO: 741) |
| | THSLSHRSPQLPGLP (SEQ ID NO: 742) |
| | PQLPGLPHPKQPSV (SEQ ID NO: 743) |
| AS32 (Misc1- | GEVELSEGGEGQRHL (SEQ ID NO: 744) |
| NO24) | GEGQRHLAFPWACSG (SEQ ID NO: 745) |
| | FPWACSGPGWRGVCC (SEQ ID NO: 746) |
| | GWRGVCCAAVEPA (SEQ ID NO: 980) |
| AS34 (Misc1- | KMRAIQAEGGHGQAC (SEQ ID NO: 747) |
| NO26) | GGHGQACCGGAWGWA (SEQ ID NO: 748) |
| | GGAWGWAPGDGGPQG (SEQ ID NO: 749) |
| | GDGGPQGMLTHTLPT (SEQ ID NO: 750) |
| | LTHTLPTLGFQSAWT (SEQ ID NO: 751) |
| | GFQSAWTWRREDADR (SEQ ID NO: 752) |
| | RREDADRAWRTPKAC (SEQ ID NO: 753) |
| | WRTPKACASRRWSI (SEQ ID NO: 754) |
| AS35 (Misc1- | LLEPFRRGEPGPRGL (SEQ ID NO: 755) |
| NO27) | EPGPRGLLSGSSRGG (SEQ ID NO: 756) |
| | SGSSRGGEGPGRSIE (SEQ ID NO: 757) |
| | GPGRSIEAAPATPLP (SEQ ID NO: 758) |
| | APATPLPCCRKNPCR (SEQ ID NO: 759) |
| | CRKNPCRPQPSRFLP (SEQ ID NO: 760) |
| | QPSRFLPPRVLLVII (SEQ ID NO: 761) |
| | RVLLVIILPKLDCPK (SEQ ID NO: 762) |
| | PKLDCPKLGF (SEQ ID NO: 763) |
| AS36 (Misc2- | PSGRRTKRLVTLRSG (SEQ ID NO: 764) |
| NO1) | LVTLRSGCAIQCWHP (SEQ ID NO: 765) |
| | AIQCWHPRAGPVPSA (SEQ ID NO: 766) |
| | AGPVPSALPHTERPP (SEQ ID NO: 767) |
| | PHTERPPRLVRGAAD (SEQ ID NO: 768) |
| | LVRGAADPRTVTLGR (SEQ ID NO: 769) |
| | RTVTLGRSPAVMPRA (SEQ ID NO: 770) |
| | PAVMPRAPA (SEQ ID NO: 771) |
| AS40 (Misc2- | DCMLSEEGGQARRGG (SEQ ID NO: 772) |
| NO3) | GQARRGGSLCSLAAH (SEQ ID NO: 773) |
| | LCSLAAHTIASAARG (SEQ ID NO: 774) |
| | IASAARGRFLSRLSN (SEQ ID NO: 775) |
| | FLSRLSNFCAVVKAS (SEQ ID NO: 776) |
| | CAVVKASRGAPSCTWE (SEQ ID NO: 777) |
| AS42 (Misc2- | PEPRRLSPGEPRGRP (SEQ ID NO: 778) |
| NO4) | GEPRGRPRKGWGIWG (SEQ ID NO: 779) |
| | KGWGIWGLCGARVGP (SEQ ID NO: 780) |
| | CGARVGPKAWR (SEQ ID NO: 781) |
| AS44 (Misc2- | FVSLTAIQMASSATP (SEQ ID NO: 782) |
| NO5) | MASSATPWGRWPVAT (SEQ ID NO: 783) |
| | GRWPVATPTAACPRR (SEQ ID NO: 784) |
| | TAACPRRRPSSLPTG (SEQ ID NO: 785) |
| | PSSLPTGGDSASKKP (SEQ ID NO: 786) |
| | DSASKKPISRRAPWQ (SEQ ID NO: 787) |
| | SRRAPWQPWACPGRS (SEQ ID NO: 788) |
| | WACPGRSVNSAAPRA (SEQ ID NO: 789) |
| | NSAAPRAWCPPATTP (SEQ ID NO: 790) |
| | CPPATTPRTQSPSRD (SEQ ID NO: 791) |
| | TQSPSRDLRPRCLSS (SEQ ID NO: 792) |
| | RPRCLSSWSS (SEQ ID NO: 793) |
| AS45 (Misc2- | PVAIKPGTGPPNNSS (SEQ ID NO: 794) |
| NO6) | GPPNNSSIHGGSKRS (SEQ ID NO: 795) |
| | HGGSKRSENSYCRDL (SEQ ID NO: 796) |
| | NSYCRDLRGQLRAIC (SEQ ID NO: 797) |
| | GQLRAICCSSYSHDR (SEQ ID NO: 798) |
| | SSYSHDRHTTEERGS (SEQ ID NO: 799) |
| | TTEERGSRGRHVWRI (SEQ ID NO: 800) |
| | GRHVWRIRRLHTSGL (SEQ ID NO: 801) |
| | RLHTSGLPCCCHSGP (SEQ ID NO: 802) |
| | CCCHSGPHPRRLPDI (SEQ ID NO: 803) |
| | PRRLPDILRLVTSTK (SEQ ID NO: 804) |
| | RLVTSTKTDHTNTTE (SEQ ID NO: 805) |
| | DHTNTTEGTLDYL (SEQ ID NO: 806) |
| AS46 (Misc2- | KWNKNVVTATLGALTI (SEQ ID NO: 807) |
| NO7) | TLGALTIRGHKLLCH (SEQ ID NO: 808) |
| | GHKLLCHLPHLLSSV (SEQ ID NO: 809) |
| | PHLLSSVQQTCRSSSR (SEQ ID NO: 810) |
| AS48 (Misc2- | ENASLVFTGSNSPIP (SEQ ID NO: 811) |
| NO8) | GSNSPIPACELSSHP (SEQ ID NO: 812) |
| | CELSSHPAHGISPWI (SEQ ID NO: 813) |
| | HGISPWIPSPGNEHF (SEQ ID NO: 814) |
| | SPGNEHFHGIKKQVK (SEQ ID NO: 815) |
| | GIKKQVKAIKVE (SEQ ID NO: 816) |
| AS49 (Misc2- | RLTQRLVQGWTPMEN (SEQ ID NO: 817) |
| NO9) | GWTPMENRWCGRRAG (SEQ ID NO: 818) |
| | WCGRRAGGQPASSST (SEQ ID NO: 819) |
| | QPASSSTRWTTCRAA (SEQ ID NO: 820) |
| | WTTCRAACLLTKWTA (SEQ ID NO: 821) |
| | LLTKWTAGRSQTSIG (SEQ ID NO: 822) |
| AS50 (Misc2- | ENSGNASRWLHVPSS (SEQ ID NO: 823) |
| NO10) | WLHVPSSSDDWLGWK (SEQ ID NO: 824) |
| | DDWLGWKKSSAITSNS (SEQ ID NO: 825) |
| AS52 (Misc2- | KGSVERRSVSLGHPA (SEQ ID NO: 826) |
| NO11) | VSLGHPAEGWAWAER (SEQ ID NO: 827) |
| | GWAWAERSLQPGMTT (SEQ ID NO: 828) |
| | LQPGMTTANTGCLSF (SEQ ID NO: 829) |
| | NTGCLSFHHRGCLLP (SEQ ID NO: 830) |
| | HRGCLLPVLPKLHCG (SEQ ID NO: 831) |
| | LPKLHCGLGGLPLVR (SEQ ID NO: 832) |
| | GGLPLVRAKEIKRVQ (SEQ ID NO: 833) |
| | KEIKRVQRAGESSLP (SEQ ID NO: 834) |
| | AGESSLPVKGLLTVA (SEQ ID NO: 835) |
| | KGLLTVASAVIAVLW (SEQ ID NO: 836) |
| | AVIAVLWGRPSEVTG (SEQ ID NO: 837) |
| | RPSEVTGENEAQHD (SEQ ID NO: 838) |
| AS53 (Misc2- | FGLTTLAGRSSHGTS (SEQ ID NO: 839) |
| NO12) | RSSHGTSGLRAATHT (SEQ ID NO: 840) |
| | LRAATHTKSGDGGQG (SEQ ID NO: 841) |
| | SGDGGQGAARQCEKL (SEQ ID NO: 842) |
| | ARQCEKLLELARATR (SEQ ID NO: 843) |
| | ELARATRPWGRSTSA (SEQ ID NO: 844) |
| | WGRSTSASSRWTHRG (SEQ ID NO: 845) |
| | SRWTHRGYMCPPRCA (SEQ ID NO: 846) |
| | MCPPRCAVACW (SEQ ID NO: 847) |
| AS54 | IIDSDKIMAVCMGCL (SEQ ID NO: 848) |
| | DKIMAVCMGCLLTRH (SEQ ID NO: 849) |
| | AVCMGCLLTRHVQCQ (SEQ ID NO: 850) |
| | GCLLTRHVQCQAMEM (SEQ ID NO: 851) |
| | TRHVQCQAMEMQQ (SEQ ID NO: 852) |
| AS55.1 (Misc2- | DGHSYTSKVNCLLLQ (SEQ ID NO: 566) |
| NO14) | VNCLLLQDGFHGCVS (SEQ ID NO: 567) |
| | GFHGCVSITGAAGRR (SEQ ID NO: 568) |
| | TGAAGRRNLSIFLFL (SEQ ID NO: 569) |
| | LSIFLFLMLCKLEFHA (SEQ ID NO: 853) |
| AS56 | LLNAEDYRCAIHSKE (SEQ ID NO: 854) |
| | CAIHSKEIYLLSPSP (SEQ ID NO: 855) |
| | YLLSPSPHQAMDKFS (SEQ ID NO: 856) |
| | QAMDKFSLCCINCNL (SEQ ID NO: 857) |
| | CCINCNLCLHVFLLL (SEQ ID NO: 858) |
| | LHVFLLLLFFQNKDV (SEQ ID NO: 859) |
| | FFQNKDVWLISNIIL (SEQ ID NO: 860) |
| | LISNIILLWIYGGI (SEQ ID NO: 861) |
| AS58 (Misc2- | VETLENANSFSSGIQ (SEQ ID NO: 862) |
| NO16) | SFSSGIQPLLCSLIG (SEQ ID NO: 863) |
| | LLCSLIGLENPT (SEQ ID NO: 864) |
| AS59 (Misc2- | AGAGTISEGSVLHGQ (SEQ ID NO: 865) |
| NO17) | GSVLHGQRLECDARR (SEQ ID NO: 866) |
| | LECDARRFFGCGTTI (SEQ ID NO: 867) |
| | FGCGTTILAEWEHH (SEQ ID NO: 868) |
| FUS9 (Misc1- | KEQILAVASLVSSQS (SEQ ID NO: 869) |
| NO2) | SLVSSQSIHPSWGQS (SEQ ID NO: 870) |
| | HPSWGQSPLSRI (SEQ ID NO: 871) |
| FUS10 (Misc1- | LELELSEGVCFRLR (SEQ ID NO: 229) |
| NO3) | |
| FUS11 (Misc1- | QQLRIFCAAMASNED (SEQ ID NO: 872) |
| NO4) | AMASNEDFS (SEQ ID NO: 873) |
| FUS18 | DGFSGSLFAVVTRRC (SEQ ID NO: 874) |
| | AVVTRRCYFLKWRTI (SEQ ID NO: 875) |
| | FLKWRTIFPQSLMWL (SEQ ID NO: 876) |
| FUS23 (Misc1- | DLRRVATYCAPLPSS (SEQ ID NO: 877) |
| NO6) | CAPLPSSWRPGTGTT (SEQ ID NO: 878) |
| | RPGTGTTIPPRMRSC (SEQ ID NO: 879) |
| FUS24 (Misc1- | LQERMELLACGAERG (SEQ ID NO: 880) |
| NO7) | ACGAERGAGGWGGGG (SEQ ID NO: 881) |
| | GGWGGGGGGGGGDRR (SEQ ID NO: 882) |
| | GGGGDRRGGGGSAPA (SEQ ID NO: 883) |
| | GGGSAPALADFAGGRG (SEQ ID NO: 884) |
| MS2 (Excl-NO6) | WTDIVKQSVSTNCIS (SEQ ID NO: 885) |
| | VSTNCISIKKGSYTK (SEQ ID NO: 886) |
| | KKGSYTKLFSLVFLI (SEQ ID NO: 887) |
| | FSLVFLIFCWPLIIQL (SEQ ID NO: 888) |
| MS4 (Excl-NO8) | LRYGALCNVSRISYF (SEQ ID NO: 889) |
| | VSRISYFSLTNIFNF (SEQ ID NO: 890) |
| | LTNIFNFVIKSLTAI (SEQ ID NO: 891) |
| | IKSLTAIFTVKF (SEQ ID NO: 548) |
| MS5 (Excl-NO9) | RKERNIRKSESTLRL (SEQ ID NO: 892) |
| | SESTLRLSPFPTPAP (SEQ ID NO: 893) |
| | PFPTPAPSGAPAAAQ (SEQ ID NO: 894) |
| | GAPAAAQGKVVRVPG (SEQ ID NO: 895) |
| | KVVRVPGPAGGLVPR (SEQ ID NO: 896) |
| | AGGLVPRDAGARLLP (SEQ ID NO: 897) |
| | AGARLLPPAGGPGGG (SEQ ID NO: 898) |
| | AGGPGGGAAAGEGRA (SEQ ID NO: 899) |
| | AAGEGRAGRGRFPSI (SEQ ID NO: 900) |
| | RGRFPSITEPRPRDL (SEQ ID NO: 901) |
| | EPRPRDLPPRVATGR (SEQ ID NO: 902) |
| | PRVATGRRAGGRRKG (SEQ ID NO: 903) |
| | AGGRRKGAGQGVRTR (SEQ ID NO: 904) |
| | GQGVRTRPLPASWPG (SEQ ID NO: 905) |
| | LPASWPGGRGPFRKG (SEQ ID NO: 906) |
| | RGPFRKGPRRLPLGS (SEQ ID NO: 907) |
| | RRLPLGSGPPAAGVQ (SEQ ID NO: 908) |
| | PPAAGVQRLRCSHLS (SEQ ID NO: 909) |
| | LRCSHLSRGPRRRRG (SEQ ID NO: 910) |
| | GPRRRRGRVCGRACV (SEQ ID NO: 911) |
| | VCGRACVSPPLPPRP (SEQ ID NO: 912) |
| | PPLPPRPPPVGLSAE (SEQ ID NO: 913) |
| | PVGLSAENLSWLSSG (SEQ ID NO: 914) |
| | LSWLSSGLPRACSWR (SEQ ID NO: 915) |
| | PRACSWREFSPETCA (SEQ ID NO: 916) |
| | FSPETCAFRLSGLDS (SEQ ID NO: 917) |
| | RLSGLDSKLSARVER (SEQ ID NO: 918) |
| | LSARVERDLGALRAP (SEQ ID NO: 919) |
| | LGALRAPGSRAAQGG (SEQ ID NO: 920) |
| | SRAAQGGGRVRGSRS (SEQ ID NO: 921) |
| | RVRGSRSEWKTRPWR (SEQ ID NO: 922) |
| | WKTRPWRPPPAWPLT (SEQ ID NO: 923) |
| | PPAWPLTRAGGPLPK (SEQ ID NO: 924) |
| | AGGPLPKNPFLESCS (SEQ ID NO: 925) |
| | PFLESCSETAQRRRV (SEQ ID NO: 926) |
| | TAQRRRVFSFSTPLS (SEQ ID NO: 927) |
| MS7 (Excl-NO11) | SINKATITGKKDLEL (SEQ ID NO: 928) |
| | GKKDLELILHVSRKK (SEQ ID NO: 929) |
| | LHVSRKKPFLPRVNI (SEQ ID NO: 930) |
| | FLPRVNITPTPISCC (SEQ ID NO: 931) |
| | PTPISCCNLKMLKKF (SEQ ID NO: 932) |
| | LKMLKKFFLLYIIIS (SEQ ID NO: 933) |
| | LLYIIISIIDLTNCL (SEQ ID NO: 934) |
| | IDLTNCLSCYLEHFY (SEQ ID NO: 935) |
| | CYLEHFYRFTFFTDV (SEQ ID NO: 936) |
| | FTFFTDVHYF (SEQ ID NO: 937) |
| MS9 (Excl-NO13) | PYYSALSGNSWVPST (SEQ ID NO: 938) |
| | NSWVPSTLESDPFGY (SEQ ID NO: 939) |
| | ESDPFGYVFSPLATR (SEQ ID NO: 940) |
| | FSPLATRPALNDQES (SEQ ID NO: 941) |
| | ALNDQESILWPTLTS (SEQ ID NO: 942) |
| | LWPTLTSVVSCALSC (SEQ ID NO: 943) |
| | VSCALSCPSLNLPEN (SEQ ID NO: 944) |
| | SLNLPENWLTLITGG (SEQ ID NO: 945) |
| | LTLITGGMKGGKKMK (SEQ ID NO: 946) |
| | KGGKKMKFTFRH (SEQ ID NO: 947) |
| MS10 (Excl- | GLRNLGNTVRAILLS (SEQ ID NO: 948) |
| NO14) | VRAILLSFLSKRNVK (SEQ ID NO: 949) |
| | LSKRNVKWCWGWGKP (SEQ ID NO: 950) |
| | CWGWGKPTSLGKACG (SEQ ID NO: 951) |
| | SLGKACGRRALKLF (SEQ ID NO: 952) |
| MS11 (Excl- | MEAENAGSLHFHEVL (SEQ ID NO: 953) |
| NO15) | LHFHEVLKMGHVKF (SEQ ID NO: 954) |
| P97 (Misc1-NO11) | GYLRMQGLMAQRLLLR (SEQ ID NO: 383) |
| P19 (Misc1-NO8) | WTPIPVLTRWPLPHP (SEQ ID NO: 955) |
| | RWPLPHPPPWRRATS (SEQ ID NO: 956) |
| | PWRRATSCRMARSSP (SEQ ID NO: 957) |
| | RMARSSPSATSGSSV (SEQ ID NO: 958) |
| | ATSGSSVRRRCSSLP (SEQ ID NO: 959) |
| | RRCSSLPSWVWNLAA (SEQ ID NO: 960) |
| | WVWNLAASTRPRSTPS (SEQ ID NO: 961) |
| P27 (Misc1-NO9) | LHPQRETFTPRWSGA (SEQ ID NO: 962) |
| | TPRWSGANYWKLAFP (SEQ ID NO: 963) |
| | YWKLAFPVGAEGTFP (SEQ ID NO: 964) |
| | GAEGTFPAAATQRGV (SEQ ID NO: 965) |
| | AATQRGVVRPA (SEQ ID NO: 966) |
| P37 (Misc1-NO10) | MAGGVLRRLLCREPD (SEQ ID NO: 967) |
| | LLCREPDRDGDKGAS (SEQ ID NO: 968) |
| | DGDKGASREETVVPL (SEQ ID NO: 969) |
| | EETVVPLHIGDPVVL (SEQ ID NO: 970) |
| | IGDPVVLPGIGQCYS (SEQ ID NO: 971) |
| | GIGQCYSALF (SEQ ID NO: 972) |
| P76, P77 (Misc2- | VFFKRAAEGFFRMNK (SEQ ID NO: 973) |
| NO18) | GFFRMNKLKESSDTN (SEQ ID NO: 974) |
| | KESSDTNPKPYCMAA (SEQ ID NO: 975) |
| | KPYCMAAPMGLTENN (SEQ ID NO: 976) |
| | MGLTENNRNRKKSYR (SEQ ID NO: 977) |
| | NRKKSYRETNLKAVS (SEQ ID NO: 978) |
| | TNLKAVSWPLNHT (SEQ ID NO: 979) |

### Example 13. Neoantigens Incorporated into VEEV Self-Replicating RNA are Immunogenic when Expressed Endogenously In Vitro

[0974] Overlapping 15-mer peptides designed to span each neoantigen are inserted into VEEV replicon using EcoRV and AscI restriction sites. Their ability to activate T cells is assessed using the exogenous autologous normal donor restimulation assay described in Example 1. Pools using TNFα and IFNγ production by CD8⁺ and CD4⁺ T cells are used as a readout.

### Example 14. Self-Replicating RNA is Encapsulated in Lipid Nanoparticles (LNP)

[0975] The self-replicating RNA was formulated as follows. The cationic lipid di((Z)-non-2-en-1-yl) 8,8′-((((2-(dimethylamino)ethyl)thio)carbonyl)azanediyl)dioctanoate, zwitterionic lipid DSPC, cholesterol and DMG-PEG 2000 were combined in ethanol in a lipid molar ratio (%) of 50:7:40:3 respectively. The lipid mix and the RNA were then combined using a microfluidic mixer from Precision Nanosystems, Inc to encapsulate the RNA in an LNP. The target N:P ratio is 9. Tangential Flow Filtration (TFF) was subsequently performed for buffer exchange and concentration of the LNP:RNA. The LNP formulated replicon RNA was stored at −80 C.

### Example 15. Neoantigens Incorporated into Self-Replicating RNA Induce Cellular Response in Mice

[0976] The purpose of these studies is to determine if the self-replicating RNA molecule (srRNA) encoding prostate neoantigens can prime an immune response that can be boosted by an Ad26, Gad20 or MVA vector and/or boost the immune response induced by a prime immunization with an Ad26 or Gad20 vector in Balb/c mice.

[0977] At Week 0, mice are immunized by IM injection with the RNA replicon formulated in an lipid nanoparticle (LNP), Ad26 or Gad20 vectors expressing the prostate neoantigens. At week 4, the animals are boosted as indicated in Table 30. Prime only control mice are immunized at Week 4. At Week 6, 2 weeks post boost, all animals are sacrificed and splenocytes are stimulated with peptide covering the antigen sequences in the prostate neoantigen insert. The induction of IFN-γ-producing cells is measured by IFN-γ ELISpot. CD8 and CD4 polyfunctional T cell responses are determined by measuring the production of IFN-γ, TNFα and IL-2 by flow cytometry. Table 30 shows the various experimental groups.

TABLE 30

| Group | Animal # | Description of groups |
|---|---|---|
| 1 | 5 | LNP buffer |
| 2 | 5 | srRNA/srRNA |
| 3 | 5 | Ad26/Ad26 |
| 4 | 5 | Gad20/Gad20 |
| 5 | 5 | Ad26/srRNA |
| 6 | 5 | Gad20/srRNA |
| 7 | 5 | Gad20/MVA |
| 8 | 5 | srRNA/Ad26 |
| 9 | 5 | srRNA/Gad20 |
| 10 | 5 | srRNA/MVA |
| 11 | 5 | srRNA prime only |
| 12 | 5 | Ad26 prime only |
| 13 | 5 | Gad20 prime only |

### Example 16 Immunogenicity of srRNA and MVA-PC NeoAg or GAd20-PC NeoAg in Non-Human Primates (NHP)

[0978] The primary aim of this study is to determine whether vaccination with the disclosed srRNA and MVA-HCa1J-9.9 or srRNA and GAd20-PC NeoAg (Gad20 encoding Prostate Neoantigens) induces prostate cancer neo antigen specific T-cell responses that are higher in magnitude and duration than vaccination with srRNA or GAd20-PC NeoAg alone in NHP. The secondary aim is to evaluate if an anti-CTLA-4 monoclonal antibody i.e., YERVOY® (ipilimumab) ([Ipi]) in combination with srRNA and MVA-HCa1J-9.9 or srRNA and GAd20-PC NeoAg can enhance the vaccine induced immune response. In addition, an explorative objective is to evaluate if anti-PD-1 monoclonal antibodies OPDIVO® (nivolumab) in combination with vaccine regimen and anti-CTLA4 is comparable or increases insert-specific T-cell responses compared to animals dosed without anti-PD-1. Cynomolgus macaques are immunized IM with srRNA-, GAd20-PC NeoAg, and/or MVA-PC NeoAg alone or in combination with Ipi (3 mg/kg sub cutaneous [SC]) or in combination with Nivolumab (10 mg/kh intravenous [IV] according to schedule shown in Table 31. Briefly, NHPs are immunized with srRNA and MVA-HCa1J-9.9 or GAd20-PC NeoAg and srRNA (Group 1 and Group 2) in combination with Ipi 3 mg/kg SC (Group 3 and Group 4) or in combination with Ipi 3 mg/kg SC and Nivolumab IV 10 mg/kg IV (Group 5 and Group 6) Animals are bled at various time points and PBMCs and serum are isolated for immunological assays. The induction of immune responses specific to Prostate Cancer Neo antigens are evaluated in PBMCs at various time points during the study by IFN-γ Elispot using peptide pools comprised of 15 mer overlapping peptides corresponding to the entire Prostate Neo antigen insert sequence or sub pools specific regions of the insert.

[0979] The srRNA vaccine is expected to elicit an antigen specific T cell response that can be further increased when administered as a regimen in combination with GAd20 PC Neo Ag or MVA PC Neo Ag. Use of immune checkpoint blockade monoclonal antibodies anti CTLA4 and/or anti PD-1 in combination with srRNA alone or as a vaccine regimen will lead to higher magnitude, quality, and more durable antigen specific T cell response.

TABLE 31

| | | | IO Agent | | | |
|---|---|---|---|---|---|---|
| | Prime/ | | | | | Day 29, |
| | Boost | Boost | | | | Day 57, |
| | Day 0 and | Day | Day | Day | Day | Day 84, |
| Group | Day 28 | 70 | 0 | 28 | 70 | Day 113 |
| 1 | srRNA/ | MVA | | | | — |
| | srRNA | | | | | |
| 2 | GAd20/ | srRNA | | | | |
| | GAd20 | | | | | |
| 2 | srRNA/ | MVA | αCTLA4 | αCTLA4 | αCTLA4 | — |
| | srRNA | | 3 mpk sc | 3 mpk sc | 3 mpk sc | |
| 3 | GAd20/ | srRNA | αCTLA4 | αCTLA4 | αCTLA4 | |
| | GAd20 | | 3 mpk sc | 3 mpk sc | 3 mpk sc | |
| | srRNA/ | MVA | αCTLA4 | αCTLA4 | αCTLA4 | αPD1 10 |
| | srRNA | | 3 mpk sc | 3 mpk sc | 3 mpk sc | mpk IV |
| 4 | GAd20/ | srRNA | αCTLA4 | αCTLA4 | αCTLA4 | αPD1 10 |
| | GAd20 | | 3 mpk sc | 3 mpk sc | 3 mpk sc | mpk IV |

[0980] In addition to evaluating the ability of srRNA vaccine to generate antigen specific T cell responses from a single administration, multi dose srRNA schedules will be explored. Multi-dose regimens are tested to evaluate if srRNA can maintain an antigen specific T cell response by administration on a monthly intramuscular dosing schedule. The effectiveness of the maintenance schedule is further evaluated by assessing antigen specific T cell response post GAd20 PC Neo Ag or srRNA, MVA PC Neo Ag combination vaccination.

[0981] One potential advantage of a srRNA based vaccine is the lack of vector specific immunity developed. Absence of vector specific immune response can allow for repeat dosing without diminishment of antigen presentation due to an inability of srRNA based vaccine to generate neutralizing antibodies specific to the vector. Multi dose srRNA based regimens are expected to elicit higher magnitude of T cell responses with a longer duration.

### Example 17. Analysis of Neoantigen Binding to HLA

[0982] The ability of FUS1 and P22 to bind to HLA was evaluated. 9-mer peptides were generated from FUS1 (SEQ ID NO: 1001) and P22 (SEQ ID NO: 1003) and the binding to HLA was evaluated. Peptides 1-3 in the tables below are 9-mers derived from FUS1 and peptides 4-10 are 9-mers derived from P22. HLA binding was evaluated as described herein (see Example 1, In vitro binding of neoantigens to Class I MHC). The results are provided in Tables 32-37 and FIG. 12A-FIG. 12F. This in-silico analysis shows that the addition of 3 amino acids result in strong binding of the antigen to multiple HLA class I alleles (A0201, B0702, and B0801). This antigen may be more effective in generating immune response in more diverse patient population (those that exhibit specific HLA alleles).

TABLE 32
Binding to HLA-A*01:01

| | | Exch I | Exch II | Average | |
|---|---|---|---|---|---|
| Peptide | Sequence | (%) | (%) | % | SD |
| Pos | CTELKLSDY | 100.0 | 100.0 | 100.0 | 0.0000 |
| Neg | NPKASLLSL | 7.4 | 5.6 | 6.5 | 1.2829 |
| UV | No peptide | 6.9 | 6.1 | 6.5 | 0.6177 |
| 1 | AMDSAITLW | 4.7 | 4.6 | 4.6 | 0.1389 |
| 2 | IAMDSAITL | 6.7 | 7.0 | 6.9 | 0.1960 |
| 3 | SLIAMDSAI | 6.9 | 6.9 | 6.9 | 0.0159 |
| 4 | SLYHREKQL | 6.7 | 6.4 | 6.6 | 0.1751 |
| 5 | LYHREKQLI | 6.2 | 5.8 | 6.0 | 0.3073 |
| 6 | YHREKQLIA | 6.2 | 5.5 | 5.8 | 0.4734 |
| 7 | HREKQLIAM | 5.5 | 5.2 | 5.4 | 0.2699 |
| 8 | QLIAMDSAI | 5.0 | 4.9 | 5.0 | 0.1259 |
| 9 | KQLIAMDSA | 6.3 | 6.3 | 6.3 | 0.0072 |
| 10 | LIAMDSAIT | 6.2 | 5.4 | 5.8 | 0.5448 |

TABLE 33
Binding to HLA-A*02:01

| | | Exch I | Exch II | Average | |
|---|---|---|---|---|---|
| Peptide | Sequence | (%) | (%) | % | SD |
| Pos | NLVPMVATV | 100.0 | 100.0 | 100.0 | 0.0000 |
| Neg | IVTDFSVIK | 8.9 | 8.2 | 8.5 | 0.4845 |
| UV | No peptide | 10.8 | 10.1 | 10.4 | 0.4620 |
| 1 | AMDSAITLW | 8.0 | 9.2 | 8.6 | 0.8618 |
| 2 | IAMDSAITL | 81.1 | 90.5 | 85.8 | 6.6484 |
| 3 | SLIAMDSAI | 57.3 | 59.7 | 58.5 | 1.6527 |
| 4 | SLYHREKQL | 82.8 | 91.2 | 87.0 | 5.9183 |
| 5 | LYHREKQLI | 11.3 | 12.3 | 11.8 | 0.7305 |
| 6 | YHREKQLIA | 16.3 | 18.1 | 17.2 | 1.2262 |
| 7 | HREKQLIAM | 7.9 | 8.6 | 8.2 | 0.5060 |
| 8 | QLIAMDSAI | 40.0 | 43.1 | 41.5 | 2.2068 |
| 9 | KQLIAMDSA | 6.9 | 7.6 | 7.2 | 0.4966 |
| 10 | LIAMDSAIT | 6.7 | 7.1 | 6.9 | 0.3420 |

TABLE 34
Binding to HLA-A*24:02

| | | Exch I | Exch II | Average | |
|---|---|---|---|---|---|
| Peptide | Sequence | (%) | (%) | % | SD |
| Pos | YYLEKANKI | 100.0 | 100.0 | 100.0 | 0.0000 |
| Neg | NLVPMVATV | 6.3 | 5.4 | 5.8 | 0.6425 |
| UV | No peptide | 6.8 | 7.0 | 6.9 | 0.1473 |
| 1 | AMDSAITLW | 5.1 | 6.0 | 5.5 | 0.6495 |
| 2 | IAMDSAITL | 6.7 | 7.3 | 7.0 | 0.4378 |
| 3 | SLIAMDSAI | 5.3 | 5.7 | 5.5 | 0.2694 |
| 4 | SLYHREKQL | 6.5 | 6.6 | 6.6 | 0.0783 |
| 5 | LYHREKQLI | 17.5 | 18.1 | 17.8 | 0.4650 |
| 6 | YHREKQLIA | 6.6 | 6.3 | 6.5 | 0.2268 |
| 7 | HREKQLIAM | 5.4 | 5.6 | 5.5 | 0.1409 |
| 8 | QLIAMDSAI | 4.8 | 4.1 | 4.5 | 0.4828 |
| 9 | KQLIAMDSA | 4.6 | 5.3 | 5.0 | 0.4519 |
| 10 | LIAMDSAIT | 4.6 | 5.1 | 4.8 | 0.3175 |

TABLE 35
Binding to HLA-B*07:02

| | | Exch I | Exch II | Average | |
|---|---|---|---|---|---|
| Peptide | Sequence | (%) | (%) | % | SD |
| Pos | NPKASLLSL | 100.0 | 100.0 | 100.0 | 0.0000 |
| Neg | LIYRRRLMK | 13.0 | 14.3 | 13.7 | 0.9662 |
| UV | No peptide | 10.6 | 13.3 | 12.0 | 1.8526 |
| 1 | AMDSAITLW | 10.0 | 9.4 | 9.7 | 0.3897 |
| 2 | IAMDSAITL | 68.7 | 65.4 | 67.1 | 2.3197 |
| 3 | SLIAMDSAI | 10.9 | 11.3 | 11.1 | 0.2933 |
| 4 | SLYHREKQL | 10.9 | 10.8 | 10.8 | 0.0301 |
| 5 | LYHREKQLI | 11.5 | 10.0 | 10.8 | 1.1065 |
| 6 | YHREKQLIA | 11.1 | 10.5 | 10.8 | 0.4656 |
| 7 | HREKQLIAM | 12.6 | 12.6 | 12.6 | 0.0482 |
| 8 | QLIAMDSAI | 12.2 | 11.8 | 12.0 | 0.2762 |
| 9 | KQLIAMDSA | 10.5 | 10.1 | 10.3 | 0.2841 |
| 10 | LIAMDSAIT | 9.8 | 9.2 | 9.5 | 0.4512 |

TABLE 36
Binding to HLA-B*08:01

| | | Exch I | Exch II | Average | |
|---|---|---|---|---|---|
| Peptide | Sequence | (%) | (%) | % | SD |
| Pos | ELRSRYWAI | 100.0 | 100.0 | 100.0 | 0.0000 |
| Neg | NLVPMVATV | 6.8 | 7.0 | 6.9 | 0.1739 |
| UV | No peptide | 7.3 | 8.4 | 7.9 | 0.7687 |
| 1 | AMDSAITLW | 6.6 | 7.3 | 7.0 | 0.5202 |
| 2 | IAMDSAITL | 7.6 | 8.1 | 7.9 | 0.3455 |
| 3 | SLIAMDSAI | 7.5 | 7.1 | 7.3 | 0.2779 |
| 4 | SLYHREKQL | 20.3 | 21.1 | 20.7 | 0.5538 |
| 5 | LYHREKQLI | 7.5 | 7.9 | 7.7 | 0.3082 |
| 6 | YHREKQLIA | 8.3 | 8.4 | 8.3 | 0.0667 |
| 7 | HREKQLIAM | 9.5 | 9.5 | 9.5 | 0.0167 |
| 8 | QLIAMDSAI | 8.0 | 7.8 | 7.9 | 0.1050 |
| 9 | KQLIAMDSA | 7.1 | 8.3 | 7.7 | 0.8841 |
| 10 | LIAMDSAIT | 6.9 | 7.7 | 7.3 | 0.5230 |

TABLE 37
Binding to HLA-B*27:05

| Pep- | | Exch I | Exch II | Average | |
|---|---|---|---|---|---|
| tide | Sequence | (%) | (%) | % | SD |
| Pos | KRWIILGLNK | 100.0 | 100.0 | 100.0 | 0.0000 |
| Neg | IVTDFSVIK | 7.7 | 5.5 | 6.6 | 1.5830 |
| UV | No peptide | 10.9 | 7.5 | 9.2 | 2.3905 |
| 1 | AMDSAITLW | 10.3 | 9.3 | 9.8 | 0.7438 |
| 2 | IAMDSAITL | 10.1 | 8.5 | 9.3 | 1.1447 |
| 3 | SLIAMDSAI | 7.1 | 5.5 | 6.3 | 1.0966 |
| 4 | SLYHREKQL | 19.0 | 14.0 | 16.5 | 3.5164 |
| 5 | LYHREKQLI | 19.3 | 15.4 | 17.4 | 2.7921 |
| 6 | YHREKQLIA | 14.4 | 11.7 | 13.1 | 1.8730 |
| 7 | HREKQLIAM | 32.3 | 29.5 | 30.9 | 2.0005 |
| 8 | QLIAMDSAI | 4.7 | 3.9 | 4.3 | 0.5382 |
| 9 | KQLIAMDSA | 11.8 | 9.8 | 10.8 | 1.3774 |
| 10 | LIAMDSAIT | 8.5 | 6.1 | 7.3 | 1.7286 |

SEQ ID NO: 662
CATCATCAATAATATACCTTATTTTGGATTGAGGCCAATATGATAATGAGGTGGGCGGGGCGAGGCGGGGCGGGTGACGTAGGACGCGCGAGTAGGGTTGGGAG
GTGTGGCGGAAGTGTGGCATTTGCAAGTGGGAGGAGCTGACATGCAATCTTCCGTCGCGGAAAATGTGACGTTTTTGATGAGCGCCGCCTACCTCCGGAAGTGC
CAATTTTCGCGCGCTTTTCACCGGATATCGTAGTAATTTTGGGCGGGACCATGTAAGATTTGGCCATTTTCGCGCGAAAAGTGAAACGGGGAAGTGAAAACTGA
ATAATAGGGCGTTAGTCATAGCGCGTAATATTTACCGAGGGCCGAGGGACTTTGACCGATTACGTGGAGGACTCGCCCAGGTGTTTTTTACGTGAATTTCCGCG
TTCCGGGTCAAAGTCTCCGTTTTTATTGTCGCCGTCATCTGACGCGGAGGGTATTTAAACCCGCTGCGCTCCTAAAGAGGCCACTCTTGAGTGCCAGCGAGAAG
AGTTTTCTCCTCCGCTCCGTTTCGGCGATCGAAAAATGAGACATTTAGCCTGCACTCCGGGTCTTTTGTCCGGCCGGGCGGCGTCCGAGCTTTTGGACGCTTTG
CTCAATGAGGTTCTGAGCGATGATTTTCCGTCTACTACCCACTTTAGCCCACCTACTCTTCACGAACTGTACGATCTGGATGTACTGGTGGATGTGAACGATCC
CAACGAGGAGGCGGTTTCTACGTTTTTTCCCGAGTCTGCGCTTTTGGCTGCCCAGGAGGGATTTGACCTACACACTCCGCCGCTGCCTATTTTAGAGTCTCCGC
TGCCGGAGCCCAGTGGTATACCTTATATGCCTGAACTGCTTCCCGAAGTGGTAGACCTGACCTGCCACGAGCCGGGCTTTCCGCCCAGCGACGATGAGGGTGAG
CCTTTTGCTTTAGACTATGCTGAGATACCTGGGCTCGGTTGCAGGTCTTGTGCATATCATCAGAGGGTTACCGGAGACCCCGAGGTTAAGTGTTCGCTGTGCTA
TATGAGGCTGACCTCTTCCTTTATCTACAGTAAGTTTTTTTGTGTAGGTGGGCTTTTTGGGTAGGTGGGTTTTGTGGCAGGACAGGTGTAAATGTTGCTTGTGT
TTTTTGTACCTGCAGGTCCGGTGTCCGAGCCAGACCCGGAGCCCGACCGCGATCCCGAGCCGGATCCCGAGCCTCCTCGCAGGCCAAGGAAATTACCTTCCATT
TTGTGCAAGCCTAAGACACCTGTGAGGACCAGCGAGGCGGACAGCACTGACTCTGGCACTTCTACCTCTCCTCCTGAAATTCACCCAGTGGTTCCTCTGGGTAT
ACATAGACCTGTTGCTGTTAGAGTTTGCGGGCGACGCCCTGCAGTAGAGTGCATTGAGGACTTGCTTAACGATCCCGAGGGACCTTTGGACTTGAGCATTAAAC
GCCCTAGGCAATAAACCCCACCTAAGTAATAAACCCCACCTAAGTAATAAACTTTACCGCCCTTGGTTATTGAGATGACGCCCAATGTTTGCTTTTGAATGACT
TCATGTGTATAATAAAAGTGAGTGTGGTCATAGGTCTCTTGTTTGTCTGGGCGGGGTTTAAGGGTATATAAGTTTCTCGGGGCTAAACTTGGTTACACTTGACC
CCAATGGAGGCGTGGGGGTGCTTGGAGGAGTTTGCGGACGTGCGCCGTTTGCTGGACGAGAGCTCTAGCAATACCTATAGTATTTGGAGGTATCTGTGGGGCTC
TACTCAGGCCAAGTTGGTCTTCAGAATTAAGCAGGATTACAAGTGCGATTTTGAAGAGCTTTTTAGTTCCTGTGGTGAGCTTTTGCAATCCTTGAATCTGGGCC
ACCAGGCTATCTTCCAGGAAAAGGTTCTCTCGACTTTGGATTTTTCCACTCCCGGGCGCACCGCCGCTTGTGTGGCTTTTGTGTCTTTTGTGCAAGATAAATGG
AGCGGGGAGACCCACCTGAGTCACGGCTACGTGCTGGATTTCATGGCGATGGCTCTTTGGAGGGCTTACAACAAATGGAAGATTCAGAAGGAACTGTACGGTTC
CGCCCTACGTCGTCCACTTCTGCAGCGGCAGGGGCTGATGTTTCCCGACCATCGCCAGCATCAGAATCTGGAAGACGAGCGAGCGGAGAAGATCAGCTTGAGAG
CCGGCCTGGACCCTCCTCAGGAGGAATGAATCTCCCGCAGGTGGTTGAGCTGTTTCCCGAACTGAGACGGGTCCTGACTATCAGGGAGGATGGTCAGTTTGTGA
AGAAGCTGAAGAGGGATCGGGGTGAGGGAGATGATGAGGCGGCTAGCAATTTAGCTTTTAGTCTGATAACTCGCCACCGACCGGAATGTATTACCTATCAGCAG
ATTAAGGAGAGTTGTGCCAACGAGCTGGATCTTTTGGGTCAGAAGTATAGCATAGAACAGCTTACCACTTACTGGCTTCAGCCCGGGGATGATTGGGAAGAGGC
GATTAGGGTGTATGCAAAGGTGGCCCTGCGGCCCGATTGCAAGTATAAGATTACTAAGTTGGTTAATATTAGAAACTGCTGCTATATTTCTGGAAACGGGGCCG
AAGTGGAGATAGATACTGAGGACAGGGTGGCTATTAGGTGTTGCATGATAAACATGTGGCCCGGGATACTGGGGATGGATGGGGTGATATTTATGAATGTGAGG
TTCACGGGCCCCAACTTTAATGGTACGGTGTTCATGGGCAACACCAACTTGCTCCTGCATGGTGCGAGTTTCTATGGGTTTAACAACACCTGTATAGAGGCCTG
GACCGATGTAAAGGTTCGAGGTTGTTCCTTTTATAGCTGTTGGAAGGCGGTGGTGTGTCGCCCTAAAAGCAGGGGTTCTGTGAAGAAATGCTTGTTTGAAAGGT
GCACCCTAGGTATCCTTTCTGAGGGCAACTCCAGGGTGCGCCATAATGTGGCTTCGAACTGCGGTTGCTTCATGCAAGTGAAGGGGGTGAGCGTTATCAAGCAT
AACTCGGTCTGTGGAAACTGCGAGGATCGCGCCTCTCAGATGCTGACCTGCTTTGATGGCAACTGTCACCTGTTGAAGACCATTCATATAAGCAGTCACCCCAG
AAAGGCCTGGCCCGTGTTTGAGCATAACATTCTGACCCGCTGTTCCTTGCATCTGGGGGTCAGGAGGGGTATGTTCCTGCCTTACCAGTGTAACTTTAGCCACA
CTAAAATCCTGCTGGAACCCGAGTGCATGACTAAGGTCAGCCTGAATGGTGTGTTTGATGTGAGTCTGAAGATTTGGAAGGTGCTGAGGTATGATGAGACCAGG
ACCAGGTGCCGACCCTGCGAGTGCGGCGGCAAGCACATGAGAAATCAGCCTGTGATGTTGGATGTGACCGAGGAGCTTAGGCCTGACCATCTGGTGCTGGCCTG
CACCAGGGCCGAGTTTGGGTCTAGCGATGAGGATACCGATTGAGGTGGGTAAGGTGGGCGTGGCTAGCAGGGTGGGCGTGTATAAATTGGGGGTCTAAGGGGTC
TCTCTGTTTGTCTTGCAACAGCCGCCGCCATGAGCGACACCGGCAACAGCTTTGATGGAAGCATCTTTAGTCCCTATCTGACAGTGCGCATGCCTCACTGGGCC
GGAGTGCGTCAGAATGTGATGGGTTCCAACGTGGATGGACGTCCCGTTCTGCCTTCAAATTCGTCTACTATGGCCTACGCGACCGTGGGAGGAACTCCGCTGGA
CGCCGCGACCTCCGCCGCCGCCTCCGCCGCCGCCGCGACCGCGCGCAGCATGGCTACGGACCTTTACAGCTCTTTGGTGGCGAGCAGCGCGGCCTCTCGCGCGT
CTGCTCGGGATGAGAAACTGACTGCTCTGCTGCTTAAACTGGAAGACTTGACCCGGGAGCTGGGTCAACTGACCCAGCAGGTTTCCAGCTTGCGTGAGAGCAGC
CTTGCCTCCCCCTAATGGCCCATAATATAAATAAAAGCCAGTCTGTTTGGATTAAGCAAGTGTATGTTCTTTATTTAACTCTCCGCGCGCGGTAAGCCCGGGAC
CAGCGGTCTCGGTCGTTTAGGGTGCGGTGGATTTTTTCCAACACGTGGTACAGGTGGCTCTGGATGTTTAGATACATGGGCATGAGTCCATCCCTGGGGTGGAG
GTAGCACCACTGCAGAGCTTCGTGCTCGGGGGTGGTGTTGTATATGATCCAGTCGTAGCAGGAGCGCTGGGCGTGGTGCTGAAAAATGTCCTTAAGCAAGAGGC
TTATAGCTAGGGGGAGGCCCTTGGTGTAAGTGTTTACAAATCTGCTTAGCTGGGAGGGGTGCATCCGGGGGGATATGATGTGCATCTTGGACTGGATTTTTAGG
TTGGCTATGTTCCCGCCCAGATCCCTTCTGGGATTCATGTTGTGCAGGACCACCAGCACGGTATATCCAGTGCACTTGGGAAATTTATCGTGGAGCTTAGACGG
GAATGCATGGAAGAACTTGGAGACGCCCTTGTGGCCTCCCAGATTTTCCATACATTCGTCCATGATGATGGCAATGGGCCCGTGGGAAGCTGCCTGAGCAAAAA
CGTTTCTGGCATCGCTCACATCGTAGTTATGTTCCAGGGTGAGGTCATCATAGGACATCTTTACGAATCGGGGGCGAAGGGTCCCGGACTGGGGGATGATGGTA
CCCTCGGGCCCCGGGGCGTAGTTCCCCTCACAGATCTGCATCTCCCAGGCTTTCATTTCAGAGGGAGGGATCATATCCACCTGCGGGGCGATGAAAAAGACAGT
TTCTGGCGCAGGGGAGATTAACTGGGATGAGAGCAGGTTTCTGAGCAGCTGTGACTTTCCACAGCCGGTGGGCCCATATATCACGCCTATCACCGGCTGCAGCT
GGTAGTTAAGAGAGCTGCAGCTGCCGTCCTCCCGGAGCAGGGGGGCCACCTCGTTGAGCATATCCCTGACGTGGATGTTCTCCCTGACCAGTTCCGCCAGAAGG
CGCTCGCCGCCCAGCGAAAGCAGCTCTTGCAAGGAAGCAAAATTTTTCAGCGGTTTCAGGCCATCGGCCGTGGGCATGTTTTTCAGCGTCTGGGTCAGCAGCTC
CAGCCTGTCCCAGAGCTCGGTGATGTGCTCTACGGCATCTCGATCCAGCAGATCTCCTCGTTTCGCGGGTTGGGGCGGCTTTCGCTGTAGGGCACCAGCCGATG
GGCGTCCAGCGGGGCCAGAGTCATGTCCTTCCATGGGCGCAGGGTCCTCGTCAGGGTGGTCTGGGTCACGGTGAAGGGGTGCGCTCCGGGTTGGGCACTGGCCA
GGGTGCGCTTGAGGCTGGTTCTGCTGGTGCTGAATCGCTGCCGCTCTTCGCCCTGCGCGTCGGCCAGGTAGCATTTGACCATGGTCTCGTAGTCGAGACCCTCG
GCGGCGTGCCCCTTGGCGCGGAGCTTTCCCTTGGAGGTGGCGCCGCACGAGGGGCACTGCAGGCTCTTCAGGGCGTAGAGCTTGGGAGCGAGAAACACGGACTC
TGGGGAGTAGGCGTCCGCGCCGCAGGCCGAGCAGACCGTCTCGCATTCCACCAGCCAAGTGAGTTCCGGGCGGTCAGGGTCAAAAACCAGGTTGCCCCCATGCT
TTTTGATGCGTTTCTTACCTTGGCTCTCCATGAGGCGGTGTCCCTTCTCGGTGACGAAGAGGCTGTCCGTGTCCCCGTAGACCGACTTCAGGGGCCTGTCTTCC
AGCGGAGTGCCTCTGTCCTCCTCGTAGAGAAACTCTGACCACTCTGAGACGAAGGCCCGCGTCCAGGCCAGGACGAAGGAGGCCACGTGGGAGGGGTAGCGGTC
GTTGTCCACTAGCGGGTCCACCTTCTCCAGGGTGTGCAGGCACATGTCCCCCTCCTCCGCGTCCAGAAAAGTGATTGGCTTGTAGGTGTAGGACACGTGACCGG
GGGTTCCCAACGGGGGGGTATAAAAGGGGGTGGGTGCCCTTTCATCTTCACTCTCTTCCGCATCGCTGTCTGCGAGAGCCAGCTGCTGGGGTAAGTATTCCCTC
TCGAAGGCGGGCATGACCTCAGCGCTCAGGTTGTCAGTTTCTAAAAATGAGGAGGATTTGATGTTCACCTGTCCGGAGGTGATACCTTTGAGGGTACCTGGGTC
CATCTGGTCAGAAAACACTATTTTTTTGTTATCAAGCTTGGTGGCGAATGACCCGTAGAGGGCGTTGGAGAGCAGCTTGGCGATGGAGCGCAGGGTCTGGTTTT
TGTCGCGGTCGGCTCGCTCCTTGGCCGCGATGTTGAGTTGCACGTACTCGCGGGCCACGCACTTCCACTCGGGGAACACGGTGGTGCGCTCGTCTGGGATCAGG
CGCACCCTCCAGCCGCGGTTGTGCAGGGTGACCATGTCGACGCTGGTGGCGACCTCACCGCGCAGACGCTCGTTGGTCCAGCAGAGGCGGCCGCCCTTGCGCGA
GCAGAAGGGGGGTAGGGGGTCCAGCTGGTCCTCGTTTGGGGGGTCCGCGTCGATGGTAAAGACCCCGGGGAGCAGGCGCGGGTCAAAGTAGTCGATCTTGCAAG
CTTGCATGTCCAGAGCCCGCTGCCATTCGCGGGCGGCGAGCGCGCGCTCGTAGGGGTTGAGGGGCGGGCCCCAGGGCATGGGGTGGGTGAGCGCGGAGGCGTAC
ATGCCGCAGATGTCATACACGTACAGGGGTTCCCTGAGGATACCGAGGTAGGTGGGGTAGCAGCGCCCCCCGCGGATGCTGGCGCGCACGTAGTCATAGAGCTC
GTGGGAGGGGGCCAGCATGTTGGGCCCGAGGTTGGTGCGCTGGGGGCGCTCGGCGCGGAAGACGATCTGCCTGAAGATGGCGTGGGAGTTGGAGGAGATGGTGG
GCCGCTGGAAGACGTTGAAGCTTGCTTCTTGCAAGCCCACGGAGTCCCTGACGAAGGAGGCGTAGGACTCGCGCAGCTTGTGCACCAGCTCGGCGGTGACCTGG
ACGTCGAGCGCACAGTAGTCGAGGGTCTCGCGGATGATGTCATACCTATCCTCCCCCTTCTTTTTCCACAGCTCGCGGTTGAGGACGAACTCTTCGCGGTCTTT
CCAGTACTCTTGGAGGGGAAACCCGTCCGTGTCCGAACGGTAAGAGCCTAGCATGTAGAACTGGTTGACGGCCTGGTAGGGGCAGCAGCCCTTCTCCACGGGCA
GCGCGTAGGCCTGCGCCGCCTTGCGGAGGGAGGTGTGGGTGAGGGCGAAAGTGTCCCTGACCATGACTTTGAGGTATTGATGTCTGAAGTCTGTGTCATCGCAG
CCGCCCTGTTCCCACAGGGTGTAGTCCGTGCGCTTTTTGGAGCGCGGGTTGGGCAGGGAGAAGGTGAGGTCATTGAAGAGGATCTTCCCCGCTCGAGGCATGAA
GTTTCTGGTGATGCGAAAGGGCCCTGGGACCGAGGAGCGGTTGTTGATGACCTGGGCGGCCAGGACGATCTCGTCAAAGCCGTTTATGTTGTGTCCCACGATGT
AGAGCTCCAGGAAGCGGGGCTGGCCCTTGATGGAGGGGAGCTTTTTAAGTTCCTCGTAGGTAAGCTCCTCGGGCGATTCCAGGCCGTGCTCCTCCAGGGCCCAG
TCTTGCAAGTGAGGGTTGGCCGCCAGGAAGGATCGCCAGAGGTCGCGGGCCATGAGGGTCTGCAGGCGGTCGCGGAAGGTTCTGAACTGCCGCCCCACGGCCAT
TTTTTCGGGGGTGATGCAGTAGAAGGTGAGGGGGTCTTTCTCCCAGGGGTCCCATCTGAGCTCTCGGGCGAGGTCGCGCGCGGCAGCGACCAGAGCCTCGTCGC
CCCCCAGTTTCATGACCAGCATGAAGGGCACGAGTTGCTTGCCAAAGGCTCCCATCCAAGTGTAGGTTTCTACATCGTAGGTGACAAAGAGGCGCTCCGTGCGA
GGATGAGAGCCGATTGGGAAGAACTGGATCTCCCGCCACCAGTTGGAGGATTGGCTGTTGATGTGGTGAAAGTAGAAGTCCCGTCTGCGGGCCGAGCACTCGTG
CTGGCTTTTGTAAAAGCGACCGCAGTACTGGCAGCGCTGCACGGGTTGTATATCTTGCACGAGGTGAACCTGGCGACCTCTGACGAGGAAGCGCAGCGGGAATC
TAAGTCCCCCGCCTGGGGTCCCGTGTGGCTGGTGGTCTTTTACTTTGGTTGTCTGGCCGCCAGCATCTGTCTCCTGGAGGGCGATGGTGGAACAGACCACCACG
CCGCGAGAGCCGCAGGTCCAGATCTCGGCGCTCGGCGGGCGGAGTTTGATGACGACATCGCGCACATTGGAGCTGTCCATGGTCTCCAGCTCCCGCGGCGGCAG
GTCAGCCGGGAGTTCCTGGAGGTTCACCTCGCAGAGACGGGTCAAGGCGCGGACAGTGTTGAGATGGTATCTGATTTCAAGGGGCATGTTGGAGGCGGAGTCGA
TGGCTTGCAGGAGGCCGCAGCCCCGGGGGGCCACGATGGTTCCCCGCGGGGCGCGAGGGGAGGCGGAAGCTGGGGGTGTGTTCAGAAGCGGTGACGCGGGCGGG
CCCCCGGAGGTAGGGGGGGTTCCGGCCCCACAGGCATGGGCGGCAGGGGCACGTCTTCGCCGCGCGCGGGCAGGGGCTGGTGCTGGCTCCGAAGAGCGCTTGCG
TGCGCGACGACGCGACGGTTGGTGTCCTGTATCTGGCGCCTCTGAGTGAAGACCACGGGTCCCGTGACCTTGAACCTGAAAGAGAGTTCGACAGAATCAATCTC
GGCATCGTTGACAGCGGCCTGGCGCAGGATCTCCTGCACGTCGCCCGAGTTGTCCTGGTAGGCGATTTCTGCCATGAACTGCTCGATCTCTTCCTCCTGGAGAT
CTCCTCGTCCGGCGCGCTCCACGGTGGCCGCCAGGTCGTTGGAGATGCGACCCATGAGCTGCGAGAAGGCGTTGAGTCCGCCCTCGTTCCAGACCCGGCTGTAG
ACCACGCCCCCCTCGGCGTCGCGGGCGCGCATGACCACCTGGGCCAGGTTGAGCTCCACGTGTCGCGTGAAGACGGCGTAGTTGCGCAGGCGCTGGAAAAGGTA
GTTCAGGGTGGTGGCGGTGTGCTCGGCGACGAAGAAGTACATGACCCAGCGCCGCAACGTGGATTCATTGATGTCCCCCAAGGCCTCCAGGCGCTCCATGGCCT
CGTAGAAGTCCACGGCGAAGTTGAAAAACTGGGAGTTGCGAGCGGACACGGTCAACTCCTCCTCCAGAAGACGGATGAGCTCGGCGACAGTGTCGCGCACCTCG
CGCTCGAAGGCCACGGGGGGCGCTTCTTCCTCTTCCACCTCTTCTTCCATGATTGCTTCTTCTTCTTCCTCAGCCGGGACGGGAGGGGGCGGCGGCGGGGGAGG
GGCGCGGCGGCGGCGGCGGCGCACCGGGAGGCGGTCGATGAAGCGCTCGATCATCTCCCCCCGCATGCGGCGCATGGTCTCGGTGACGGCGCGGCCGTTCTCCC
GGGGGCGCAGCTCGAAGACGCCGCCTCTCATTTCGCCGCGGGGCGGGCGGCCGTGAGGTAGCGAGACGGCGCTGACTATGCATCTTAACAATTGCTGTGTAGGT
ACGCCGCCAAGGGACCTGATTGAGTCCAGATCCACCGGATCCGAAAACCTTTGGAGGAAAGCGTCTATCCAGTCGCAGTCGCAAGGTAGGCTGAGCACCGTGGC
GGGCGGGGGCGGGTCGGGAGAGTTCCTGGCGGAGATGCTGCTGATGATGTAATTAAAGTAGGCGGTCTTGAGAAGGCGGATGGTGGACAGGAGCACCATGTCTT
TGGGTCCGGCCTGTTGGATGCGGAGGCGGTCGGCCATGCCCCAGGCCTCGTTCTGACACCGGCGCAGGTCTTTGTAGTAATCTTGCATGAGTCTTTCCACCGGC
ACTTCTTCTCCTTCCTCTTCTTCATCTCGCCGGTGGTTTCTCGCGCCGCCCATGCGCGTGACCCCAAAGCCCCTGAGCGGCTGCAGCAGGGCCAGGTCGGCGAC
CACGCGCTCGGCCAAGATGGCCTGCTGTACCTGAGTGAGGGTCCTCTCGAAGTCATCCATGTCCACGAAGCGGTGGTAGGCACCCGTGTTGATGGTGTAGGTGC
AGTTGGCCATGACGGACCAGTTGACGGTCTGGTGTCCCGGCTGCGAGAGCTCCGTGTACCGCAGGCGCGAGAAGGCGCGGGAATCGAACACGTAGTCGTTGCAA
GTCCGCACCAGATACTGGTAGCCCACCAGGAAGTGCGGCGGAGGTTGGCGATAGAGGGGCCAGCGCTGGGTGGCGGGGGCGCCGGGCGCCAGGTCTTCCAGCAT
GAGGCGGTGGTATCCGTAGATGTACCTGGACATCCAGGTGATGCCTGCGGCGGTGGTGGTGGCGCGCGCGTAGTCGCGGACCCGGTTCCAGATGTTTCGCAGGG
GCGAGAAGTGTTCCATGGTCGGCACGCTCTGGCCGGTGAGGCGCGCGCAGTCGTTGACGCTCTATACACACACAAAAACGAAAGCGTTTACAGGGCTTTCGTTC
TGTAGCCTGGAGGAAAGTAAATGGGTTGGGTTGCGGTGTGCCCCGGTTCGAGACCAAGCTGAGCTCAGCCGGCTGAAGCCGCAGCTAACGTGGTATTGGCAGTC
CCGTCTCGACCCAGGCCCTGTATCCTCCAGGATACGGTCGAGAGCCCTTTTGCTTTCTTGGCCAAGCGCCCGTGGCGCGATCTGGGATAGATGGTCGCGATGAG
AGGACAAAAGCGGCTCGCTTCCGTAGTCTGGAGAAACAATCGCCAGGGTTGCGTTGCGGCGTACCCCGGTTCGAGCCCCTATGGCGGCTTGGATCGGCCGGAAC
CGCGGCTAACGTGGGCTGTGGCAGCCCCGTCCTCAGGACCCCGCCAGCCGACTTCTCCAGTTACGGGAGCGAGCCCCTTTTGTTTTTTTATTTTTTAGATGCAT
CCCGTGCTGCGGCAGATGCGCCCCTCGCCCCGGCCCGATCAGCAGCAGCAACAGCAGGCATGCAGACCCCCCTCTCCTCTCCCCGCCCCGGTCACCACGGCCGC
GGCGGCCGTGTCCGGTGCGGGGGGCGCGCTGGAGTCAGATGAGCCACCGCGGCGGCGACCTAGGCAGTATCTGGACTTGGAAGAGGGCGAGGGACTGGCGCGGC
TGGGGGCGAGCTCTCCAGAGCGCCACCCGCGGGTGCAGTTGAAAAGGGACGCGCGTGAGGCGTACCTGCCGCGGCAAAACCTGTTTCGCGACCGCGGGGGCGAG
GAGCCCGAGGAGATGCGGGACTGCAGGTTCCAAGCGGGGCGCGAGCTGCGCCGCGGCTTGGACAGACAGCGCCTGCTGCGCGAGGAGGACTTTGAGCCCGACAC
GCAGACGGGCATCAGCCCCGCGCGCGCGCACGTGGCCGCGGCCGACCTGGTGACCGCCTACGAGCAGACGGTGAACCAGGAGCGCAACTTCCAAAAAAGCTTCA
ACAACCACGTGCGCACGCTGGTGGCGCGCGAGGAGGTGACCCTGGGTCTCATGCATCTGTGGGACCTGGTGGAGGCGATCGTGCAGAACCCCAGCAGCAAGCCC
CTGACCGCGCAGCTGTTCCTGGTGGTGCAGCACAGCAGGGACAACGAGGCCTTCAGGGAGGCGCTGCTGAACATCACCGAGCCGGAGGGGCGCTGGCTCCTGGA
CCTGATAAACATCCTGCAGAGCATAGTGGTGCAGGAGCGCAGCCTGAGCCTGGCCGAGAAGGTGGCGGCCATTAACTATTCTATGCTGAGCCTGGGCAAGTTCT
ACGCTCGCAAGATCTACAAGACCCCCTACGTGCCCATAGACAAGGAGGTGAAGATAGACAGCTTCTACATGCGCATGGCGCTGAAGGTGCTAACCCTGAGCGAC
GACCTGGGAGTGTACCGCAACGAGCGCATCCACAAGGCCGTGAGCGCCAGCCGGCGGCGCGAGCTGAGCGACCGCGAACTGATGCACAGTCTGCAGCGCGCGCT
GACCGGCGCGGGCGAGGGCGACAGGGAGGTCGAGTCCTACTTTGACATGGGGGCCGACCTGCACTGGCAGCCGAGCCGCCGCGCCCTGGAAGCGGCGGGGGCGT
ACGGCGGCCCCCTGGCGGCCGATGACGAGGAAGAGGAGGACTATGAGCTAGAGGAGGGCGAGTACCTGGAGGACTGACCTGGCTGGTGGTGTTTTGGTATAGAT
GCAAGATCCGAACGTGGCGGACCCGGCGGTCCGGGCGGCGCTGCAGAGCCAGCCGTCCGGCATTAACTCCTCTGACGACTGGGCCGCGGCCATGGGTCGCATCA
TGGCCCTGACCGCGCGCAACCCCGAGGCCTTCAGGCAGCAGCCTCAGGCTAACCGGCTGGCGGCCATCTTGGAAGCGGTAGTGCCCGCGCGCTCCAACCCCACC
CACGAGAAGGTGCTGGCCATAGTCAACGCGCTGGCGGAGAGCAGGGCCATCCGGGCAGACGAGGCCGGACTGGTGTACGATGCGCTGCTGCAGCGGGTGGCGCG
GTACAACAGCGGCAACGTGCAGACCAACCTGGACCGCCTGGTGACGGACGTGCGCGAGGCCGTGGCGCAGCGCGAGCGCTTGCATCAGGACGGCAACCTGGGCT
CGCTGGTGGCGCTAAACGCCTTCCTTAGCACCCAGCCGGCCAACGTACCGCGGGGGCAGGAGGACTACACCAACTTCTTGAGCGCGCTGCGGCTGATGGTGACC
GAGGTCCCTCAGAGCGAGGTGTACCAGTCGGGGCCCGACTACTTCTTCCAGACCAGCAGACAGGGCTTGCAAACCGTGAACCTGAGCCAGGCTTTCAAGAACCT
GCGGGGGCTGTGGGGAGTGAAGGCGCCCACCGGCGACCGGGCTACGGTGTCCAGCCTGCTAACCCCCAACTCGCGCCTGCTGCTGCTGCTGATCGCGCCCTTCA
CGGACAGCGGGAGCGTCTCGCGGGAGACCTATCTGGGCCACCTGCTGACGCTGTACCGCGAGGCCATCGGGCAGGCGCAGGTGGACGAGCACACCTTCCAGGAG
ATCACCAGCGTGAGCCACGCGCTGGGGCAGGAGGACACGGGCAGCCTGCAGGCGACCCTGAACTACCTGCTGACCAACAGGCGGCAGAAGATTCCCACGCTGCA
CAGCCTGACCCAGGAGGAGGAGCGCATCTTGCGCTACGTGCAGCAGAGCGTGAGCCTGAACCTGATGCGCGACGGCGTGACGCCCAGCGTGGCGCTGGACATGA
CCGCGCGCAACATGGAACCGGGCATGTACGCTTCCCAGCGGCCGTTCATCAACCGCCTGATGGACTACTTGCATCGGGCGGCGGCCGTGAACCCCGAGTACTTC
ACCAATGCCATTCTGAATCCCCACTGGATGCCCCCTCCGGGTTTCTACAACGGGGACTTCGAGGTGCCTGAGGTCAACGATGGGTTCCTCTGGGATGACATGGA
TGACAGTGTGTTCTCCCCCAACCCGCTGCGCGCCGCGTCTCTGCGATTGAAGGAGGGCTCTGACAGGGAAGGACCAAGGAGTCTGGCCTCCTCCCTGGCTCTGG
GGGCGGTGGGCGCCACGGGCGCGGCGGCGCGGGGCAGCAGCCCCTTCCCCAGCCTGGCGGACTCTCTGAATAGCGGGCGGGTGAGCAGGCCCCGCTTGCTAGGC
GAGGAGGAGTATCTGAACAACTCCCTGCTGCAGCCCGTGAGGGACAAAAACGCTCAGCGGCAGCAGTTTCCCAACAATGGGATAGAGAGCCTGGTGGACAAGAT
GTCCAGATGGAAGACGTATGCGCAGGAGTACAAGGAGTGGGAGGACCGCCAGCCGCGGCCCCTGCCGCCCCCTAGACAGCGCTGGCAGCGGCGCGCGTCCAACC
GCCGCTGGAGGCAGGGGCCCGAGGACGATGATGACTCTGCAGATGACAGCAGCGTGTTGGACCTGGGCGGGAGCGGGAACCCCTTTTCGCACCTGCGCCCACGC
CTGGGCAAGATGTTTTAAAAGAGAAAAATAAAAACTCACCAAGGCCATGGCGACGAGCGTTGGTTTTTTGTTCCCTTCCTTAGTATGCGGCGCGCGGCGATGTT
CGAGGAGGGGCCTCCCCCCTCTTACGAGAGCGCGATGGGAATTTCTCCTGCGGCGCCCCTGCAGCCTCCCTACGTGCCTCCTCGGTACCTGCAACCTACAGGGG
GGAGAAATAGCATCTGTTACTCTGAGCTGCAGCCCCTGTACGATACCACCAGACTGTACCTGGTGGACAACAAGTCCGCGGACGTGGCCTCCCTGAACTACCAG
AACGACCACAGCGATTTTTTGACCACGGTGATCCAAAACAACGACTTCACCCCAACCGAGGCCAGTACCCAGACCATAAACCTGGACAACAGGTCGAACTGGGG
CGGCGACCTGAAGACTATCCTGCACACCAATATGCCCAACGTGAACGAGTTCATGTTCACCAACTCTTTTAAGGCGCGGGTGATGGTGGCGCGCGAGCAGGGGG
AGGCGAAGTACGAGTGGGTGGACTTCACGCTGCCCGAGGGCAACTACTCAGAGACCATGACTCTCGACCTGATGAACAATGCGATCGTGGAACACTATCTGAAA
GTGGGCAGGCAGAACGGGGTGAAGGAGAGCGATATCGGGGTCAAGTTTGACACCAGAAACTTCCGTCTGGGCTGGGACCCTGTGACCGGGCTGGTCATGCCGGG
GGTCTACACCAACGAGGCCTTTCATCCCGATATAGTGCTCCTGCCCGGCTGTGGGGTGGACTTCACCCAGAGCCGGCTGAGCAACCTGCTGGGCGTTCGCAAGC
GGCAACCTTTCCAGGAGGGTTTCAAGATCACCTATGAGGATCTGGAGGGGGGCAACATTCCCGCGCTCCTTGATCTGGACGCCTACGAGGAGAGCTTGAAACCC
GAGGAGAGCGCTGGCGACAGCGGCGAGAGTGGCGAGGAGCAAGCCGGCGGCGGCGGCAGCGCGTCGGTAGAAAACGAAAGTACTCCCGCAGTGGCGGCGGACGC
TGCGGAGGTCGAGCCGGAGGCCATGCAGCAGGACGCAGAGGAGGGCGCGCAGGAGGACATGAACAATGGGGAGATCAGGGGCGACACTTTCGCCACCCGGGGCG
AAGAAAAAGAGGCAGAGGCGGCGGCGGCGACGGCGGAAGCCGAAACCGAGGCAGAGGCAGAGCCCGAGACCGAAGTTATGGAAGACATGAATGATGGAGAACGT
AGGGGTGACACGTTTGCCACCCGGGGCGAAGAGAAGGCGGCGGAGGCAGAAGCCGCGGCTGAGGAGGCGGCTGCGGCTGCGGCCAAGGCTGAGGCTGCGGCTGA
GGCTAAGGTCGAAGCCGATGTTGCGGTTGAGGCTCAGGCTGAGGAGGAGGCGGCGGCTGAAGCAGTTAAGGAAAAGGCCCAGGCAGAGCAGGAAGAGAAAAAAC
CTGTCATTCAACCTCTAAAAGAAGATAGCAAAAAGCGCAGTTACAACGTCATTGAGGGCAGCACCTTTACCCAATACCGCAGCTGGTACCTGGCTTACAACTAC
GGCGACCCGGTCAAGGGGGTGCGCTCGTGGACCCTGCTCTGCACGCCGGACGTCACCTGCGGCTCCGAGCAGATGTACTGGTCGCTGCCAAACATGATGCAAGA
CCCGGTGACCTTCCGTTCCACGCGGCAGGTTAGCAACTTTCCGGTGGTGGGCGCCGAACTGCTGCCAGTACACTCCAAGAGTTTTTACAACGAGCAGGCCGTCT
ACTCCCAGCTGATCCGCCAGGCCACCTCTCTGACCCACGTGTTCAATCGCTTTCCCGAGAACCAGATTTTGGCGCGCCCGCCGGCCCCCACCATCACCACCGTC
AGTGAAAACGTTCCTGCCCTCACAGATCACGGGACGCTACCGCTGCGCAACAGCATCTCAGGAGTCCAGCGAGTGACCATTACTGACGCCAGACGCCGGACCTG
CCCCTACGTTTACAAGGCCTTGGGCATAGTCTCGCCGCGCGTCCTCTCCAGTCGCACTTTTTAAAACACATCCACCCACACGCTCCAAAATCATGTCCGTACTC
ATCTCGCCCAGCAACAACACCGGCTGGGGGCTGCGCGCACCCAGCAAGATGTTTGGAGGGGCAAGGAAGCGCTCCGACCAGCACCCCGTGCGCGTGCGCGGCCA
CTACCGCGCGCCCTGGGGTGCGCACAAGCGCGGGCGCACAGGGCGCACCACTGTGGATGATGTCATTGACTCCGTAGTGGAGCAGGCGCGCCACTACACACCCG
GCGCGCCGACCGCCTCCGCCGTGTCCACCGTGGACCAGGCGATCGAAAGCGTGGTACAGGGGGCGCGGCACTATGCCAACCTTAAAAGTCGCCGCCGCCGCGTG
GCGCGCCGCCATCGCCGGAGACCCCGGGCTACTGCCGCCGCGCGCCTTACCAAGGCTCTGCTCAAGCGCGCCAGGCGAACTGGCCACCGGGCCGCCATGAGGGC
CGCACGGCGGGCTGCCGCTGCCGCGAGCGCCGTGGCCCCGCGGGCACGAAGGCGCGCGGCCGCTGCCGCCGCCGCCGCCATTTCCAGCTTGGCCTCGACGCGGC
GCGGTAACATATACTGGGTGCGCGACTCGGTGAGCGGCACACGTGTGCCCGTGCGCTTTCGCCCCCCACGGAATTAGCACAAGACAACATACACACTGAGTCTC
CTGCTGTTGTGTATCCCAGCGGCGACCGTCAGCAGCGGCGACATGTCCAAGCGCAAAATTAAAGAAGAGATGCTCCAGGTCATCGCGCCGGAGATCTATGGGCC
CCCGAAGAAGGAGGAGGAGGATTACAAGCCCCGCAAGCTAAAGCGGGTCAAAAAGAAAAAGAAAGATGATGACGTTGACGAGGCGGTGGAGTTTGTCCGCCGCA
TGGCGCCCAGGCGCCCTGTGCAGTGGAAGGGTCGGCGCGTGCAGCGAGTCCTGCGCCCCGGCACCGCGGTGGTCTTTACGCCCGGCGAGCGTTCCACGCGCACT
TTCAAGCGGGTGTACGATGAGGTGTACGGCGACGAGGATCTGTTGGAGCAGGCCAACCATCGATTTGGGGAGTTTGCATATGGGAAACGGCCTCGCGAGAGTCT
AAAAGAGGACCTGCTGGCGCTACCGCTGGACGAGGGCAATCCCACCCCGAGTCTGAAGCCGGTGACCCTGCAACAGGTGCTGCCTTTGAGCGCGCCCAGCGAGC
AGAAGCGAGGGTTAAAGCGCGAGGGCGGGGACCTGGCACCCACCGTGCAGTTGATGGTGCCCAAGCGGCAGAAGCTGGAGGACGTGCTGGAGAAAATGAAAGTA
GAGCCCGGGATCCAGCCCGAGATCAAGGTCCGCCCTATCAAGCAGGTGGCGCCCGGCGTGGGAGTCCAGACCGTGGACGTTAGGATTCCCACGGAGGAGATGGA
AACCCAAACCGCCACTCCCTCTTCGGCAGCAAGCGCCACCACCGGCGCCGCTTCGGTAGAGGTGCAGACGGACCCCTGGCTACCCGCCGCCACTATCGCCGTCG
CCGCCGCCCCCCGTTCGCGCGGACGCAAGAGAAATTATCCAGCGGCCAGCGCGCTTATGCCCCAGTATGCGCTGCATCCATCCATCGCGCCCACCCCCGGCTAC
CGCGGGTACTCGTACCGCCCGCGCAGATCAGCCGGCACTCGCGGCCGCCGCCGCCGTGCGACCACAACCAGCCGCCGCCGTCGCCGCCGCCGCCAGCCAGTGCT
GACCCCCGTGTCTGTAAGGAAGGTGGCTCGCTCGGGGAGCACGCTGGTGGTGCCCAGAGCGCGCTACCACCCCAGCATCGTTTAAAGCCGGTCTCTGTATGGTT
CTTGCAGATATGGCCCTCACTTGTCGCCTTCGCTTCCCGGTGCCGGGATACCGAGGAAGAACTCACCGCCGCAGGGGCATGGCGGGCAGCGGTCTCCGCGGCGG
CCGTCGCCATCGCCGGCGCGCAAAGAGCAGGCGCATGCGCGGCGGTGTGTTGCCCCTGCTGGTCCCGCTACTCGCCGCGGCGATCGGCGCCGTGCCCGGGATCG
CCTCCGTGGCCCTGCAGGCGTCCCAGAAACATTGACTCTTGCAACCTTGCAAGCTTGCATTTTTGGAGGAAAAAATAAAAAAGTCTAGACTCTCACGCTCGCTT
GGTCCTGTGACTATTTTGTAGAAAAAAGATGGAAGACATCAACTTTGCGTCGCTGGCCCCGCGTCACGGCTCGCGCCCGTTCATGGGAGACTGGACAGATATCG
GCACCAGCAATATGAGCGGTGGCGCCTTCAGCTGGGGCAGTCTGTGGAGCGGCCTTAAAAATTTTGGTTCCACCATTAAGAACTATGGCAACAAAGCGTGGAAC
AGCAGCACGGGTCAGATGCTGAGAGACAAGTTGAAAGAGCAGAACTTCCAGGAGAAGGTGGCGCAGGGCCTGGCCTCTGGCATCAGCGGGGTGGTGGACATAGC
TAACCAGGCCGTGCAGAAAAAGATAAACAGTCATCTGGACCCCCGCCCTCAGGTGGAGGAAACGCCTCCAGCCATGGAGACGGTGTCTCCCGAGGGCAAAGGCG
AAAAGCGCCCGCGGCCCGACAGGGAAGAGACCCTGGTGTCACACACCGAGGAGCCGCCCTCTTACGAGGAGGCAGTCAAGGCCGGCCTGCCCACCACTCGCCCC
ATAGCTCCCATGGCCACCGGTGTGGTGGGTCACAGGCAACACACCCCCGCAACACTAGATCTGCCCCCGCCGTCCGAGCCGACTCGCCAGCCAAAGGCGGTGAC
GGTGTCCGCTCCCTCCACTTCCGCCGCCAACAGAGTGCCTCTGCGCCGCGCTGCGAGCGGCCCCCGGGCCTCGCGAGTCAGCGGCAACTGGCAGAGCACACTGA
ACAGCATCGTGGGCCTGGGAGTGAGGAGTGTGAAGCGCCGCCGTTGCTACTGAATGAGCAAGCTAGCTAACGTGTTGTATGTGTGTATGCGTCCTATGTCGCCG
CCAGAGGAGCTGTTGAGCCGCCGGCGCCGTCTGCACTCCAGCGAATTTCAAGATGGCGACCCCATCGATGATGCCTCAGTGGTCGTACATGCACATCTCGGGCC
AGGACGCTTCGGAGTACCTGAGCCCCGGGCTGGTGCAGTTCGCCCGCGCCACAGACACCTACTTCAACATGAGTAACAAGTTCAGGAACCCCACTGTGGCGCCC
ACCCACGATGTGACCACGGACCGGTCGCAGCGCCTGACGCTGCGGTTCATCCCCGTGGATCGGGAGGACACCGCTTACTCTTACAAGGCGCGGTTCACGCTGGC
CGTGGGCGACAACCGCGTGCTGGACATGGCCTCCACTTACTTTGACATCCGGGGGGTGCTGGACAGGGGCCCCACTTTTAAGCCCTACTCGGGCACTGCCTACA
ACCCCCTGGCCCCCAAGGGCGCCCCCAATTCTTGTGAGTGGGAACAAGAGGAAAATCAGGTGGTCGCTGCAGATGATGAACTTGAAGATGAAGAAGCGCAAGCA
CAAGAGGAAGCCCCTGTGAAAAAAATTCATGTATATGCTCAGGCGCCTCTTTCTGGCGAAAAGATTTCCAAGGATGGTATCCAAATAGGTACTGAAGTCGTAGG
AGATACATCTAAGGACACTTTTGCAGATAAAACATTCCAACCCGAACCTCAGATAGGCGAGTCTCAGTGGAACGAGGCTGATGCCACAGCAGCAGGAGGTAGAG
TTTTGAAAAAGACTACCCCTATGAGACCTTGCTATGGATCCTATGCCAGGCCTACCAATGCCAACGGGGGTCAAGGAATTATGGTTGCCAATGAACAAGGAGTG
TTGGAGTCTAAAGTAGAAATGCAATTTTTCTCTAACACCACAACCCTTAATGCGCGGGATGGAACCGGCAATCCCGAACCAAAGGTGGTGTTGTACAGCGAAGA
TGTCCACTTGGAATCTCCCGATACTCATCTGTCTTACAAGCCCAAAAAGGATGATGTTAATGCCAAAATCATGTTGGGTCAGCAAGCCATGCCCAACAGACCCA
ACCTCATTGGATTTAGAGATAATTTCATTGGGCTTATGTTTTACAACAGCACCGGTAACATGGGAGTGCTGGCGGGTCAGGCCTCTCAGTTGAATGCTGTGGTG
GACTTGCAGGATAGAAACACAGAACTGTCATATCAGCTTCTGCTTGATTCAATTGGGGATAGAACCAGATACTTCTCCATGTGGAACCAGGCAGTGGATAGCTA
TGATCCAGATGTCAGAATTATTGAAAACCATGGGACTGAGGATGAACTGCCCAACTACTGCTTCCCTTTGGGCGGCATAGGAGTTACTGATACTTATCAAGGGA
TAAAAAATACCAATGGCAATGGTCAGTGGACCAAAGATGATCAGTTCGCGGACCGCAACGAAATAGGGGTGGGAAACAACTTCGCCATGGAGATCAACATCCAG
GCCAACCTTTGGAGAAACTTCCTCTATGCAAACGTGGGGCTCTACCTGCCAGACAAGCTCAAGTACAACCCCACCAACGTGGACATCTCTGACAACCCCAACAC
CTATGACTACATGAACAAGCGGGTGGTGGCCCCTGGCCTGGTGGACTGCTTTGTCAATGTGGGAGCCAGGTGGTCCCTGGACTACATGGACAACGTCAACCCCT
TCAACCACCACCGCAATGCGGGTCTGCGCTACCGCTCCATGATCCTGGGCAACGGGCGCTATGTGCCCTTTCACATCCAGGTACCCCAGAAGTTCTTTGCCATC
AAGAACCTCCTGCTCCTGCCCGGCTCCTACACCTACGAGTGGAACTTCAGGAAGGATGTGAACATGGTCCTACAGAGCTCTCTGGGCAATGACCTTAGGGTGGA
TGGGGCCAGCATCAAGTTTGACAGCATCACCCTCTATGCTACATTTTTCCCCATGGCCCACAACACCGCCTCCACGCTTGAGGCCATGCTGAGAAACGACACCA
ACGACCAGTCCTTTAATGACTACCTCTCTGGGGCCAACATGCTCTACCCAATCCCAGCCAAGGCCACCAACGTGCCCATCTCCATCCCCTCTCGCAACTGGGCC
GCCTTTAGAGGCTGGGCCTTTACCCGCCTTAAGACCAAGGAGACCCCCTCCCTGGGCTCGGGTTTTGATCCCTACTTTGTTTACTCGGGATCCATCCCCTACCT
GGATGGCACCTTCTACCTCAACCACACTTTCAAGAAGATATCCATCATGTATGACTCCTCCGTCAGCTGGCCGGGCAACGACCGCTTGCTCACCCCCAATGAGT
TCGAGGTCAAGCGCGCCGTGGACGGCGAGGGCTACAACGTGGCCCAGTGCAACATGACCAAGGACTGGTTCCTGGTGCAGATGCTGGCCAACTACAACATAGGC
TACCAGGGCTTTTACATCCCAGAGAGCTACAAGGACAGGATGTACTCCTTCTTCAGAAATTTCCAACCCATGAGCCGACAGGTGGTGGACGAGACCAATTACAA
GGACTATCAAGCCATTGGCATCACCCACCAGCACAACAACTCGGGTTTCGTGGGCTACCTGGCGCCCACCATGCGCGAGGGTCAGGCCTACCCCGCCAACTTCC
CCTACCCCTTGATAGGCAAGACCGCGGTCGACAGCGTCACCCAGAAAAAGTTCCTCTGCGACCGCACCCTCTGGCGCATCCCCTTCTCTAGCAACTTCATGTCC
ATGGGTGCGCTCACGGACCTGGGCCAAAACCTGCTTTATGCCAACTCTGCCCATGCGCTGGACATGACTTTTGAGGTGGACCCCATGGACGAGCCCACCCTTCT
CTATATTGTGTTTGAAGTGTTCGACGTGGTCAGAGTGCACCAGCCGCACCGCGGTGTCATCGAGACCGTGTACCTGCGTACGCCCTTCTCAGCCGGCAACGCCA
CCACCTAAGGAGACAGCGCCGCCGCCGCCTGCATGACGGGTTCCACCGAGCAAGAGCTCAGGGCCATTGCCAGAGACCTGGGATGCGGACCCTATTTTTTGGGC
ACCTATGACAAACGCTTCCCGGGCTTTATCTCCCGAGACAAGCTCGCCTGCGCCATTGTCAACACGGCCGCGCGCGAGACCGGGGGCGTGCACTGGCTGGCCTT
TGGCTGGGACCCGCGCTCCAAAACTTGCTACCTCTTTGACCCCTTTGGCTTCTCCGATCAGCGCCTCAGGCAGATTTATGAGTTTGAGTACGAGGGGCTGCTGC
GCCGCAGCGCGCTCGCCTCCTCGCCCGACCGCTGCATCACCCTTGAGAAGTCCACCGAAACCGTGCAGGGGCCCCACTCGGCCGCCTGCGGTCTCTTCTGTTGC
ATGTTTTTGCACGCCTTTGTGCACTGGCCTCAGAGTCCCATGGATTGCAACCCCACCATGAACTTGCTAAAGGGAGTGCCCAACGCCATGCTCCAGAGCCCCCA
GGTCCAGCCCACCCTGCGCCGCAACCAGGAACAGCTTTACCGCTTCCTGGAGCGCCACTCCCCCTACTTCCGCAGCCACAGCGCGCGCATCCGGGGGGCCACCT
CTTTTTGCCACTTGCAAGAAAACATGCAAGACGGAAAATGATGTACAGCATGCTTTTAATAAATGTAAAGACTGTGCACTTTAATTATACACGGGCTCTTTCTG
GTTATTTATTCAACACCGCCGTCGCCATTTAGAAATCGAAAGGGTTCTGCCGTGCGTCGCCGTGCGCCACGGGCAGAGACACGTTGCGATACTGGAAGCGGCTC
GCCCACTTGAACTCGGGCACCACCATGCGGGGCAGTGGTTCCTCGGGGAAGTTCTCGCTCCACAGGGTGCGGGTCAGCTGCAGCGCGCTCAGGAGGTCGGGAGC
CGAGATCTTGAAGTCGCAGTTGGGGCCGGAACCCTGCGCGCGCGAGTTGCGGTACACGGGGTTGCAGCACTGGAACACCAGCAGGGCCGGATTATTCACGCTGG
CCAGCAGGCTCTCGTCGCTGATCATGTCGCTGTCCAGATCCTCCGCGTTGCTCAGGGCGAATGGGGTCATCTTGCAGACCTGCCTGCCCAGGAAAGGCGGGAGC
CCAGGCTTGCCGTTGCAGTCGCAGCGCAGGGGCATTAGCAGGTGCCCACGGCCCGACTGCGCCTGCGGGTACAACGCGCGCATGAAGGCTTCGATCTGCCTAAA
AGCCACCTGGGTCTTGGCTCCCTCCGAAAAGAACATCCCACAGGACTTGCTGGAGAACTGGTTCGCGGGACAGCTGGCATCGTGCAGGCAGCAGCGCGCGTCAG
TGTTGGCAATCTGCACCACGTTGCGACCCCACCGGTTTTTCACTATCTTGGCCTTGGAAGCCTGCTCCTTTAGCGCGCGCTGGCCGTTCTCGCTGGTCACATCC
ATCTCTATCACCTGTTCCTTGTTGATCATGTTTGTCCCGTGCAGACACTTTAGGTCGCCCTCCGTCTGGGTGCAGCGGTGCTCCCACAGCGCGCAACCGGTGGG
CTCCCAATTCTTGTGGGTCACCCCCGCGTAGGCCTGCAGGTAGGCCTGCAGGAAGCGCCCCATCATGGTCATAAAGGTCTTCTGGCTCGTAAAGGTCAGCTGCA
GGCCGCGATGCTCTTCGTTCAGCCAGGTCTTGCAGATGGCGGCCAGCGCCTCGGTCTGCTCGGGCAGCATCTTAAAATTTGTCTTCAGGTCGTTATCCACGTGG
TACTTGTCCATCATGGCACGCGCCGCCTCCATGCCCTTCTCCCAGGCGGACACCATGGGCAGGCTTAGGGGGTTTATCACTTCCAGCGGCGAGGACACCGTACT
TTCGATTTCTTCTTCCTCCCCCTCTTCCCGGCGCGCGCCCCCGCTGTTGCGCGCTCTTACCGCCTGCACCAAGGGGTCGTCTTCAGGCAAGCGCCGCACCGAGC
GCTTGCCGCCCTTGACCTGCTTGATCAGTACCGGCGGGTTGCTGAAGCCCACCATGGTCAGCGCCGCCTGCTCTTCTTCGTCTTCGCTGTCTACCACTATTTCT
GGGGAGGGGCTTCTCCGCTCTGCGGCAAAGGCGGCGGATCGCTTCTTTTTTTTCTTGGGAGCCGCCGCGATGGAGTCCGCCACGGCGACCGAGGTCGAGGGCGT
GGGGCTGGGGGTGCGCGGTACCAGGGCCTCGTCGCCCTCGGACTCTTCCTCTGACTCCAGGCGGCGGCGGAGTCGCTTCTTTGGGGGCGCGCGCGTCAGCGGCG
GCGGAGACGGGGACGGGGACGGGGACGGGACGCCCTCCACAGGGGGTGGTCTTCGCGCAGACCCGCGGCCGCGCTCGGGGGTCTTCTCGCGCTGGTCTTGGTCC
CGACTGGCCATTGTATCCTCCTCCTCCTAGGCAGAGAGACATAAGGAGTCTATCATGCAAGTCGAGAAGGAGGAGAGCTTAACCACCCCCTCAGAGACCGCCGA
TGCGCCCGCCGTCGCCGTCGCCCCCGCTACCGCCGACGCGCCCGCCACACCGAGCGACACCCCCACGGACCCCCCCGCCGACGCACCCCTGTTCGAGGAAGCGG
CCGTGGAGCAGGACCCGGGCTTTGTCTCGGCAGAGGAGGATTTGCAAGAGGAGGAGAATAAGGAGGAGAAGCCCTCAGTGCCAAAAGATCATAAAGAGCAAGAC
GAGCACGACGCAGACGCACACCAGGGTGAAGTCGGGCGGGGGGACGGAGGGCATGGCGGCGCCGACTACCTAGACGAAGGAAACGACGTGCTCTTGAAGCACCT
GCATCGTCAGTGCGCCATCGTCTGCGACGCTCTGCAGGAGCGCAGCGAGGTGCCCCTCAGCGTGGCGGAGGTCAGCCGCGCCTACGAGCTCAGCCTCTTTTCCC
CCCGGGTGCCCCCCCGCCGCCGCGAAAACGGCACATGCGAGCCCAACCCGCGCCTCAACTTCTACCCCGCCTTTGTGGTGCCCGAGGTCCTGGCCACCTATCAC
ATCTTCTTTCAAAATTGCAAGATCCCCATCTCGTGCCGCGCCAACCGTAGCCGCGCCGATAAGATGCTGGCCCTGCGCCAGGGCGACCACATACCTGATATCGC
CGCTTTGGAAGATGTGCCAAAGATCTTCGAGGGTCTGGGGCGCAACGAGAAGCGGGCAGCAAACTCTCTGCAACAGGAAAACAGCGAAAATGAGAGTCACACTG
GAGCGCTGGTGGAGCTGGAGGGCGACAACGCCCGCCTGGCGGTGCTCAAGCGCAGCATCGAGGTCACCCACTTTGCCTACCCCGCGCTCAACCTGCCCCCCAAA
GTCATGAACGCGGTCATGGACGGGCTGATCATGCGCCGCGGCCGGCCCCTCGCTCCAGATGCAAACTTGCATGAGGAGACCGAGGACGGTCAGCCCGTGGTCAG
CGACGAGCAGCTGACGCGCTGGCTGGAGAGCGCGGACCCCGCCGAACTGGAGGAGCGGCGCAAGATGATGATGGCCGCGGTGCTGGTCACCGTAGAGCTGGAGT
GTCTGCAGCGCTTCTTCGGTGACCCCGAGATGCAGAGAAAGGTCGAGGAGACCCTACACTACACCTTCCGCCAGGGCTACGTGCGCCAGGCTTGCAAGATCTCC
AACGTGGAGCTCAGCAACCTGGTGTCCTACCTGGGCATCTTGCATGAAAACCGCCTTGGGCAGAGCGTGCTACACTCCACCCTGCGCGGGGAGGCGCGCCGCGA
CTACGTGCGCGACTGCGTTTACCTCTTCCTCTGCTACACCTGGCAGACGGCCATGGGGGTCTGGCAGCAGTGCCTGGAGGAGCGCAACCTCAAGGAGCTGGAGA
AGCTTCTGCAGCGCGCGCTCAAAGACCTCTGGACGGGCTTCAACGAGCGCTCGGTGGCCGCCGCGCTAGCCGACCTCATCTTCCCCGAGCGCCTGCTCAAAACC
CTCCAGCAGGGGCTGCCCGACTTCACCAGCCAAAGCATGTTGCAAAATTTTAGGAACTTTATCCTGGAGCGTTCTGGCATCCTACCCGCCACCTGCTGCGCCCT
GCCCAGCGACTTTGTCCCCCTCGTGTACCGCGAGTGCCCCCCGCCGCTGTGGGGCCACTGCTACCTGTTCCAACTGGCCAACTACCTGTCCTACCACGCGGACC
TCATGGAGGACTCCAGCGGCGAGGGGCTCATGGAGTGCCACTGCCGCTGCAACCTCTGCACGCCCCACCGCTCCCTGGTCTGCAACACCCAACTGCTCAGCGAG
AGTCAGATTATCGGTACCTTCGAGCTACAGGGTCCGTCCTCCTCAGACGAGAAGTCCGCGGCTCCGGGGCTAAAACTCACTCCGGGGCTGTGGACTTCCGCCTA
CCTGCGCAAATTTGTACCTGAAGACTACCACGCCCACGAAATCAGGTTTTACGAGGACCAATCCCGCCCGCCCAAGGCGGAGCTGACCGCCTGCGTCATCACCC
AGGGCGAGATCCTAGGCCAATTGCAAGCCATCCAAAAAGCCCGCCAAGAGTTTTTGCTGAAGAGGGGTCGGGGGGTGTATCTGGACCCCCAGTCGGGTGAGGAG
CTCAACCCGGTTCCCCCGCTGCCACCGCCGCGGGACCTTGCTTCCCAGGATAAGCATCGCCATGGCTCCCAGAAAGAAGCAGCAGCGGCCGCCGCTGCCGCCGC
CCCACATGCTGGAGGAAGAGGAGGAATACTGGGACAGTCAGGCAGAGGAGGTTTCGGACGAGGAGGAGCCGGAGACGGAGATGGAAGAGTGGGAGGAGGACAGC
TTAGACGAGGAGGCTTCCGAAGCCGAAGAGGCAGGCGCAACACCGTCACCCTCGGCCGCAGCCCCCTCGCAGGCGCCCCCGAAGTCCGCTCCCAGCATCAGCAG
CAACAGCAGCGCTATAACCTCCGCTCCTCCACCGCCGCGACCCACGGCCGACCGCAGACCCAACCGTAGATGGGACACCACCGGAACCGGGGCCGGTAAGTCCT
CCGGGAGAGGCAAGCAAGCGCAGCGCCAAGGCTACCGCTCGTGGCGCGCTCACAAGAACGCCATAGTCGCTTGCTTGCAAGACTGCGGGGGGAACATCTCCTTC
GCCCGCCGCTTCCTGCTCTTCCACCACGGTGTGGCCTTCCCCCGTAACGTCCTGCATTACTACCGTCATCTCTACAGCCCCTACTGCGGCGGCAGTGAGCCAGA
GGCGGCCAGCGGCGGCGGCGCCCGTTTCGGTGCCTAGGAAGACCCAGGGCAAGACTTCAGCCAAGAAACTCGCGGCGACCGCGGCGAACGCGGTCGCGGGGGCC
CTGCGCCTGACGGTGAACGAACCCCTGTCGACCCGCGAACTGAGGAACCGAATCTTCCCCACTCTCTATGCCATCTTCCAGCAGAGCAGAGGGCAGGATCAGGA
ACTGAAAGTAAAAAACAGGTCTCTGCGCTCCCTCACCCGCAGCTGTCTGTATCACAAGAGCGAAGACCAGCTTCGGCGCACGCTGGAGGACGCTGAGGCACTCT
TCAGCAAATACTGCGCGCTCACTCTTAAGGACTAGCTCCGCGCCCTTCTCGAATTTAGGCGGGAACGCCTACGTCATCGCAGCGCCGCCGTCATGAGCAAGGAC
ATTCCCACGCCATACATGTGGAGCTATCAGCCGCAGATGGGACTCGCGGCGGGCGCCTCCCAAGACTACTCCACCCGCATGAACTGGCTCAGTGCCGGCCCACA
CATGATCTCACAGGTTAATGACATCCGCACCCATCGAAACCAAATATTGGTGAAGCAGGCGGCAATTACCACCACGCCCCGCAATAATCCCAACCCCAGGGAGT
GGCCCGCGTCCCTGGTGTATCAGGAAATTCCCGGCCCCACCACCGTACTACTTCCGCGTGATTCCCAGGCCGAAGTCCAAATGACTAACTCAGGGGCACAGCTC
GCGGGCGGCTGTCGTCACAGGGTGCGGCCTCCTCGCCAGGGTATAACTCACCTGGAGATCCGAGGCAGAGGTATTCAGCTCAACGACGAGTCGGTGAGCTCCTC
GCTCGGTCTCAGACCTGACGGGACCTTCCAGATAGCCGGAGCCGGCCGATCTTCCTTCACGCCCCGCCAGGCGTACCTGACTCTGCAGAGCTCGTCCTCGGCGC
CGCGCTCGGGCGGCATCGGGACTCTCCAGTTCGTGCAGGAGTTTGTGCCCTCGGTCTACTTCAACCCCTTCTCGGGCTCTCCCGGTCGCTACCCGGACCAGTTT
ATCCCGAACTTTGACGCCGCGAGGGACTCGGTGGACGGCTACGACTGAATGTCGGGTGGACCCGGTGCAGAGCAACTTCGCCTGAAGCACCTTGACCACTGCCG
CCGCCCTCAGTGCTTTGCCCGCTGTCAGACCGGTGAGTTCCAGTACTTTTCCCTGCCCGACTCGCACCCGGACGGCCCGGCGCACGGGGTGCGCTTTTTCATCC
CGAGTCAGGTCCGCTCTACCCTAATCAGGGAGTTCACCGCCCGTCCCCTACTGGCGGAGTTGGAAAAGGGGCCTTCTATCCTAACCATTGCCTGCATTTGCTCT
AACCCTGGATTACACCAAGATCTTTGCTGTCATTTGTGTGCTGAGTATAATAAAGGCTGAGATCAGAATCTACTCGGGCTCCTGTCGCCATCCTGTCAACGCCA
CCGTCCAAGCCCGGCCCGATCAGCCCGAGGTGAACCTCACCTGTGGTCTGCACCGGCGCCTGAGGAAATACCTAGCTTGGTACTACAACAGCACTCCCTTTGTG
GTTTACAACAGCTTTGACCAGGACGGGGTCTCACTGAGGGATAACCTCTCGAACCTGAGCTACTCCATCAGGAAGAACAACACCCTCGAGCTACTTCCTCCTTA
CCTGCCCGGGACTTACCAGTGTGTCACCGGCCCCTGCACCCACACCCACCTGTTGATCGTAAACGACTCTCTTCCGAGAACAGACCTCAATAACTCCTCTCCGC
AGTTCCCCAGAACAGGAGGTGAGCTCAGGAAACCCCGGGTAAAGAAGGGTGGACAAGAGTTAACACTTGTGGGGTTTCTGGTATATGTGACGCTGGTGGTGGCT
CTTTTGATTAAGGCTTTTCCTTCCATGTCTGAACTATCCCTCTTCTTTTATGAACAACTCGACTAGTGCTAACGGGACCCTACCCAACGAATCGGGATTGAATA
TCGGTAACCAGGTTGCAGTTTCACTTTTGATTACCTTCATAGTCCTCTTCCTGCTAGTGCTGTCGCTTCTGTGCCTGCGGATCGGGGGCTGCTGCATCCACGTT
TATATCTGGTGCTGGCTGTTTAGAAGGTTCGGAGACCACCGCAGGTAGAATAATGCTGCTTACCCTCTTTGTCCTGGCGCTGGCTGCCAGCTGCCAAGCCTTTT
CCGAGGCTGACTTCATAGAGCCCCAGTGCAATATCACTTATAAATCTGAACGTGCCATCTGTACTATTCTAATCAAATGTGTTACTCAACACGATAAGGTGACT
GTTAAATACAAAGATCAATTAAAAAAAGACGCACTTTACAGCAGCTGGCAACCAGGAGATGATCAAAAATACAATGTAACCGTCTTCCAGGGCAAACTCTCCAA
AACTTACAATTACAATTTCCCATTTGAGCAGATGTGTGACTTTGTCATGTACATGGAAAAGCAGTACAAGCTGTGGCCTCCAACTCCCCAGGGCTGTGTGGAAA
ATCCAGGCTCTTTCTGTATGATCTCTCTCTGTGTAACTGTGCTGGCACTAATACTCACGCTTCTGTATCTCAGATTTAAATCAAGGCAAAGCTTCATTGATGAA
AAGAAAATGCCATAATCGCTCAACGCTTGATTGCTAACACCGGGTTTTTATCCGCAGAATGATTGGAATCACCCTACTAATCACCTCCCTCCTTGCGATTGCCC
ATGGGTTGGAACGAATCGAAGTCCCTGTGGGGGCCAATGTTACCCTGGTGGGGCCTGTCGGCAATGCTACATTAATGTGGGAAAAATATACTAAAAATCAATGG
GTTTCTTACTGCACTAACAAAAACAGCCACAAGCCCAGAGCCATCTGCGATGGGCAAAATCTAACCTTGATTGATGTTCAATTGCTGGATGCGGGCTACTATTA
TGGGCAGCTGGGTACAATGATTAATTACTGGAGACCCCACAGAGATTACATGCTTCACGTAGTAAAGGGTCCCATTAGCAGCCCAACCACCACCTCTACCACAC
CCACTACCACCACTACTCCCACCACCAGCACTGCCGCCCAGCCTCCTCATAGCAGAACAACCACTTTTATCAATTCCAAGTCCCACTCCCCCCACATTGCCGGC
GGGCCCTCCGCCTCAGACTCCGAGACCACCGAGATCTGCTTCTGCAAATGCTCTGACGCCATTGCCCAGGATTTGGAAGATCACGAGGAAGATGAGCATGACTA
CGCAGATGCATGCCAGGCATCAGAGGCAGAAGCGCTACCGGTGGCCCTAAAACAGTATGCAGACTCCCACACCACCCCCAACCTTCCTCCACCTTCCCAGAAGC
CAAGTTTCCTGGGGGAAAATGAAACTCTGCCTCTTTCCATACTAGCTCTGACATCTGTTGCTATTTTGGCCGCTCTGCTGGTGCTTCTATGCTCTATATGCTAC
CTGATCTGCTGCAGAAAGAAAAAATCTCACGGCCATGCTCACCAGCCCCTCATGCACTTCCCTTACCCTCCAGAGCTGGGCGACCACAAACTTTAAGTCTGCAG
TAGCTATCTGCCCATCCCTTGTCAGTCGACAGCGATGAGCCCCACTAATCTAACAGCCTCTGGACTTACAACATTGTCTCTTAATGAGACCACCGCTCCTCAAG
ACCTGTACGATGGTGTCTCCGCGCTGGTTAACCAGTGGGATCACCTGGGCATATGGTGGCTCCTCATAGGAGCAGTGACCCTGTGCCTAATCCTGGTCTGGATC
ATCTGCTGCATCAAAAGCAGAAGACCCAGGCGGCGGCCCATCTACAGGCCCTTCGTCATCACACCTGAAGATAATGATGATGATGACACCACCTCCAGGCTGCA
GAGCCTAAAGCAGCTACTCTTCTCTTTTACAGCATGGTAAATTGAATCATGCCCCGCATTTTCATCTACTTGCTTCTCCTTCCACTTTTTCTGGGCTCCTCTAC
ATTGGCCACTGTGTCCCACATCGAGGTAGACTGCCTCACGCCCTTCACAGTCTACCTGCTTTTCGGCTTTGTCATCTGCACCTTTGTCTGCAGCGTTATCACTG
TAGTGATCTGCTTCATACAGTGCATCGACTACATCTGTGTGCGGGTGGCCTACTTTAGACACCACCCCCAGTATCGCAACAGGGACATAGCGGCTCTCCTAAGA
CTTGTTTAAATCATGGCCAAATTACCTGTGATTGGTCTTCTGATTATCTGCTGCGTCCTAGCCGCGATTGGGACTCAACCTAATACCACCACCAGCGCTCCCAG
AAAGAGACATGTATCCTGCAGCTTCAAGCGTCCCTGGAATATACCCCAATGCTTTACTGATGAACCTGAAATCTCTTTGGCTTGGTACTTCAGCGTCACCGCCC
TTCTCATCTTCTGCAGTACGGTTATTGCTCTTGCCATCTACCCTTCCCTTAACCTGGGCTGGAATGCTGTCAACTCTATGGAATATCCCACCTTCCCAGAACCA
GACCTGCCAGACCTGGTTGTTCTAAACGCGTTTCCTCCTCCTCCAGTTCAAAATCAGTTTCGCCCTCCGTCCCCTACGCCCACTGAGGTCAGCTACTTTAATCT
AACAGGCGGAGATGACTGAAAACCTAGACCTAGAAATGGACGGTCTCTGCAGCGAGCAACGCACACTAGAGAGGCGCCGGCAAAAAGCAGAGCTCGAGCGTCTT
AAACAAGAGCTCCAAGACGCCGTGGCCATACACCAGTGCAAAAAAGGGCTCTTCTGTCTGGTAAAACAGGCCACGCTCACCTATGAAAAAACAGGTGACACCCA
CCGCCTAGGATACAAGCTGCCCACACAGCGCCAAAAGTTTGCCCTTATGATAGGTGAACAACCCATCACCGTCACCCAGCACTCCGTGGAGACAGAAGGCTGCA
TTCATGCTCCCTGCAGGGGCGCTGACTGCCTCTACACCTTGATCAAAACCCTCTGCGGTCTCAGAGACCTTATCCCTTTCAATTGATCATAACTGTAATCAATA
AAAAATCACTTACTTGAAATCTGATAGCAAGACTCTGTCCAATTTTTTCAGCAACACTTCCTTCCCCTCCTCCCAACTCTGGTACTCTAGGCGCCTCCTAGCTG
CAAACTTCCTCCACAGTCTGAAGGGAATGTCAGATTCCTCCTCCTGTCCCTCCGCACCCACGATCTTCATGTTGTTACAGATGAAACGCGCGAGATCGTCTGAC
GAGACCTTCAACCCCGTGTACCCCTACGATACCGAGATCGCTCCGACTTCTGTCCCTTTCCTTACCCCTCCCTTTGTATCATCCGCAGGAATGCAAGAAAATCC
AGCTGGGGTGCTGTCCCTGCACCTGTCAGAGCCCCTTACCACCCACAATGGGGCCCTGACTCTAAAAATGGGGGGCGGCCTGACCCTGGACAAGGAAGGGAATC
TCACTTCCCAAAACATCACCAGTGTCGATCCCCCTCTCAAAAAAAGCAAGAACAACATCAGCCTTCAGACCGCCGCACCCCTCGCCGTCAGCTCCGGGGCCCTA
ACCCTTTTTGCCACTCCCCCCCTAGCGGTCAGTGGCGACAACCTTACTGTGCAGTCTCAGGCCCCTCTTACTTTGGAAGACTCAAAACTAACTCTGGCCACCAA
AGGACCCCTAACTGTGTCCGAAGGCAAACTTGTCCTAGAAACAGAGCCTCCCCTGCATGCAAGTGACAGCAGTAGCCTGGGCCTTAGCGTCACGGCCCCACTTA
GCATTAACAATGACAGCCTAGGACTAGACATGCAAGCGCCCATCAGCTCTCGAGATGGAAAACTGGCTCTAACAGTGGCGGCCCCCCTAACTGTGGCCGAGGGT
ATCAATGCTTTGGCAGTAGCCACAGGTAATGGTATTGGACTAAATGAAACCAACACACACCTGCAGGCAAAACTGGTCGCGCCCCTAGGCTTTGATACCAACGG
CAACATTAAGCTAAGCGTCGCAGGAGGCATGAGGCTAAACAATAACACACTGATACTAGATGTAAACTACCCATTTGAGGCTCAAGGCCAACTGAGCCTAAGAG
TGGGCTCGGGCCCACTATATGTAGATTCTAGTAGTCATAACCTAACCATTAGATGCCTTAGGGGATTGTATGTAACATCTTCTAACAACCAAAACGGTCTAGAG
GCCAACATTAAACTAACAAAAGGCCTTGTGTATGACGGAAATGCCATAGCAGTTAATGTTGGCAAAGGGCTGGAATACAGCCCTACTGGCACAACAGAAAAACC
TATACAGACTAAAATAGGTCTAGGCATGGAGTATGACACTGAGGGAGCCATGATGACAAAACTAGGCTCTGGACTAAGCTTTGACAATTCAGGAGCCATTGTGG
TGGGAAACAAAAATGATGACAGGCTTACTTTGTGGACCACACCGGACCCATCGCCCAACTGTCAGATTTACTCTGAAAAAGATGCTAAACTAACCTTGGTACTG
ACTAAATGTGGCAGTCAGGTTGTAGGCACAGTATCTATTGCCGCTCTTAAAGGTAGCCTTGTGCCAATCACTAGTGCAATCAGTGTGGTTCAGATATACCTAAG
GTTTGATGAAAATGGGGTGCTGATGAGTAACTCTTCACTTAATGGCGAATACTGGAATTTTAGAAACGGAGACTCAACTAATGGCACACCATATACAAACGCAG
TGGGTTTTATGCCTAATCTACTGGCCTATCCTAAAGGTCAAACTACAACTGCAAAAAGTAACATTGTCAGCCAGGTCTACATGAACGGGGACGATACTAAACCC
ATGACATTTACAATCAACTTCAATGGCCTTAGTGAAACAGGGGATACCCCTGTCAGTAAATATTCCATGACATTCTCATGGAGGTGGCCAAATGGAAGCTACAT
AGGGCACAATTTTGTAACAAACTCCTTTACTTTCTCCTACATCGCCCAAGAATAAAGAAAGCACAGAGATGCTTGTTTTTGATTTCAAAATTGTGTGCTTTTAT
TTATTTTCAAGCTTACAGTATTTCCAGTAGTCATTAGAATAGAGCTTAATTAAACTGCATGAGAACCCTTCCACATAGCTTAAATTATCACCAGTGCAAATGGA
AAAAAATCAACATACCTTTTTATCCAGATATCAAAGAACTCTAGTGGTCAGTTTTCCCCCACCCTCCCAGCTCACAGAATACACAGTCCTTTCCCCCCGGCTGG
CTTTAAACAACACTATCTCATTGGTAACAGACATATTTTTAGGTGTAATAATCCACACGGTCTCTTGGCGGGCCAAACGCTGGTCTGTGATGTTAATAAACTCC
CCAGGCAGCTCTTTCAAGTTCACGTCGCTGTCCAACTGCTGAAGCGCTCGCGGCTCCGACTGCGCCTCTAGCGGAGGCAACGGCAGCACCCGATCCTTGATCTA
TAAAGGAGTAGAGTCATAATCCCCCATAAGAATAGGGCGGTGATGCAGCAACAAGGCGCGCAGCAACTCCTGCCGCCGCCTCTCCGTACGACAGGAATGCAACG
GGGTGGTGGTCTCCTCCGCGATAATCCGCACCGCTCGCAGCATCAGCATCCTCGTCCTCCGGGCACAGCAGCGCATCCTGATCTCACTGAGATCGGCGCAGTAA
GTGCAGCACAACACCAAGATGTTATTTAAGATCCCACAGTGCAAAGCACTGTACCCAAAGCTCATGGCGGGAAGGACAGCCCCCACGTGACCATCGTACCAGAT
CCTCAGGTAAATCAAATGACGACCTCTCATAAACACGCTGGACATATACATCACCTCCTTGGGCATGAGCTGATTCACCACCTCTCGATACCACAGGCATCGCT
GATTAATTAAAGACCCCTCGAGCACCATCCTGAACCAGGAAGCCAGCACCTGACCCCCCGCCAGGCACTGCAGGGACCCCGGTGAATCGCAGTGGCAGTGAAGA
CTCCAGCGCTCGTAGCCGTGAACCATAGAGCTGGTCATTATATCCACATTGGCACAACACAGACACACTTTCATACACTTTTTCATGATTAGCAGCTCCTCTCT
AGTCAAGACCATATCCCAAGGAATCACCCACTCTTGAATCAAGGTAAATCCCACACAGCAGGGCAGGCCTCTCACATAACTCACGTTATGCATAGTGAGCGTGT
CGCAATCTGGAAATACCGGATGATCTTCCATCACCGAAGCCCGGGTCTCCGTCTCAAAGGGAGGTAAACGGTCCCTCGTGTAGGGACAGTGGCGGGATAATCGA
GATCGTGTTGAACGTAGAGTCATGCCAAAGGGAACAGCGGACGTACTCATATTTCCTCCAGCAGAACCAAGTGCGCGCGTGGCAGCTATCCCTGCGTCTTCTGT
CTCGCCGCCTGCCCCGCTCGGTGTAGTAGTTGTAATACAGCCACTCCCTCAGACCGTCAAGGCGCTCCCTGGCGTCCGGATCTATAACAACACCGTCCTGCAGC
GCCGCCCTGATGACATCCACCACCGTAGAGTATGCCAAGCCCAGCCACGAAATGCACTCACTTTGACAGCGAGAGATAGGAGGAGCGGGAAGAGATGGAAGAAC
CATGATAGTAAAAGAACTTTTATTCCAATCGATCCTCTACAATGTCAAAGTGTAGATCTATCAGATGGCACTGGTCTCCTCCGCTGAGTCGATCAAAAATAACA
GCTAAACCACAAACAACACGATTGGTCAAATGCTGCACAAGGGCTTGCAGCATAAAATCGCCTCGAAAGTCCACCGCAAGCATAACATCAAAGCCACCGCCCCT
ATCATGATCTATGATAAAAACCCCACAGCTATCCACCAGACCCATATAGTTTTCATCTCTCCATCGTGAAAAAATATTTACAAGCTCCTCCTTTAAATCACCTC
CAACCAATTCAAAAAGTTGAGCCAGACCGCCCTCCACCTTCATTTTCAGCATGCGCATCATGATTGCAAAAATTCAGGCTCCTCAGACACCTGTATAAGATTGA
GAAGCGGAACGTTAACATCAATGTTTCGCTCGCGAAGATCGCGCCTCAGTGCAAGCATGATATAATCCCACAGGTCGGAGCGGATCAGCGAGGACATCTCCCCG
CCAGGAACCAACTCAACGGAGCCTATGCTGATTATAATACGCATATTCGGGGCTATGCTAACCAGCACGGCCCCCAAATAGGCGTACTGCATAGGCGGCGACAA
AAAGTGAACAGTTTGGGTTAAAAAATCAGGCAAACACTCGCGCAAAAAAGCAAGAACATCATAACCATGCTCATGCAAATAGATGCAAGTAAGCTCAGGAACGA
CCACAGAAAAATGCACAATTTTTCTCTCAAACATGACTGCGAGCCCTGCAAAAAATAAAAAAGAAACATTACACAAGAGTAGCCTGTCTTACAATGGGATAGAC
TACTCTAACCAACATAAGACGGGCCACGACATCGCCCGCGTGGCCATAAAAAAAATTATCCGTGTGATTAAAAAGAAGCACAGATAGCTGGCCAGTCATATCCG
GAGTCATCACGTGCGAACCCGTGTAGACCCCCGGGTTGGACACATCGGCCAAACAAAGAAAGCGGCCAATGTATCCCGGAGGAATGATAACACTAAGACGAAGA
TACAACAGAATAACCCCATGGGGGGGAATAACAAAGTTAGTAGGTGAATAAAAACGATAAACACCCGAAACTCCCTCCTGCGTAGGCAAAATAGCGCCCTCCCC
TTCCAAAACAACATACAGCGCTTCCACAGCAGCCATGACAAAAGACTCAAAACACTCAAAAGACTCAGTCTTACCAGGAAAATAAAAGCACTCTCACAGCACCA
GCACTAATCAGAGTGTGAAGAGGGCCAAGTGCCGAACGAGTATATATAGGAATTAAAAATGACGTAAATGTGTAAAGGTCAAAAAACGCCCAGAAAAATACACA
GACCAACGCCCGAAACGAAAACCCGCGAAAAAATACCCAGAAGTTCCTCAACAACCGCCACTTCCGCTTTCCCACGATACGTCACTTCCTCAAAAATAGCAAAC
TACATTTCCCACATGTACAAAACCAAAACCCCTCCCCTTGTCACCGCCCACAACTTACATAATCACAAACGTCAAAGCCTACGTCACCCGCCCCGCCTCGCCCC
GCCCACCTCATTATCATATTGGCCTCAATCCAAAATAAGGTATATTATTGATGATG

### EMBODIMENTS

[0983] The following list of embodiments is intended to complement, rather than displace or supersede, the previous descriptions.

[0984] Embodiment 1. A self-replicating RNA molecule comprising an RNA encoding a polypeptide of SEQ ID NO: 1001, 1003, or a combination thereof.

[0985] Embodiment 2. The self-replicating RNA molecule of embodiment 1, wherein the RNA corresponds to a polynucleotide of SEQ ID NO: 1000, 1002, or a combination thereof.

[0986] Embodiment 3. The self-replicating RNA molecule of embodiment 1 or 2, wherein the RNA encodes one or more polypeptides selected from the group consisting of SEQ ID NOs: 1001, 1003, 1, 3, 5, 7, 9, 11, 13, 15, 17, 19, 21, 23, 25, 27, 29, 31, 33, 35, 37, 39, 41, 43, 45, 47, 49, 51, 53, 55, 57, 59, 61, 63, 65, 67, 69, 71, 73, 75, 77, 79, 81, 83, 85, 87, 89, 91, 93, 95, 97, 99, 101, 103, 105, 107, 109, 111, 113, 115, 117, 119, 121, 123, 125, 127, 129, 131, 133, 135, 137, 139, 141, 143, 145, 147, 149, 151, 153, 155, 157, 159, 161, 163, 165, 167, 169, 171, 173, 175, 177, 179, 181, 183, 185, 187, 189, 191, 193, 195, 197, 199, 201, 203, 205, 207, 209, 211, 213, 215, 217, 219, 221, 223, 225, 227, 229, 231, 233, 235, 237, 239, 241, 243, 245, 247, 249, 251, 253, 255, 257, 259, 261, 263, 265, 267, 269, 271, 273, 275, 277, 279, 281, 283, 285, 287, 289, 291, 293, 295, 297, 299, 301, 303, 305, 307, 309, 311, 313, 315, 317, 319, 321, 323, 325, 327, 329, 331, 333, 335, 337, 339, 341, 343, 345, 347, 349, 351, 353, 355, 357, 359, 361, 363, 365, 367, 369, 371, 373, 375, 379, 381, 383, 385, 387, 388, 389, 390, 391, 392, 393, 394, 395, 396, 397, 398, 399, 400, 401, 402, 403, 404, 405, 406, 407, 408, 426, 427, 428, 429, 430, 431, 432, 433, 434, 435, 436, 437, 438, 439, 440, 441, 442, 443, 444, 445, 446, 447, and fragments thereof.

[0987] Embodiment 4. The self-replicating RNA molecule of any one of the previous embodiments, wherein the self-replicating RNA molecule comprises an RNA encoding a one or more polypeptides selected from the group consisting of SEQ ID NOs: 1001, 1003, 275, 381, 333, 337, 269, 253, 309, 325, 271, 305, 251, 245, 261, 265, 317, 255, 277, 297, 285, 437, 439, 442, 444, 379, 343, 211, 349, 213, 215, 221, 219, 225, 345, 353, 235, 223, 167, 171, 19, 23, 177, and fragments thereof.

[0988] Embodiment 5. The self-replicating RNA molecule of any one of the previous embodiments, comprising an RNA encoding a polypeptide of SEQ ID NOs: 541, 543, 550, 552, 554, 555, 556, 557, 558, 559, 623, or 624, 625, 626, 1004, or 1005.

[0989] Embodiment 6. The self-replicating RNA molecule of any one of the previous embodiments, wherein the RNA corresponds to one or more polynucleotides selected from the group consisting of SEQ ID NOs: 1000, 1002, 2, 4, 6, 8, 10, 12, 14, 16, 18, 20, 22, 24, 26, 28, 30, 32, 34, 36, 38, 40, 42, 44, 46, 48, 50, 52, 54, 56, 58, 60, 62, 64, 66, 68, 70, 72, 74, 76, 78, 80, 82, 84, 86, 88, 90, 92, 94, 96, 98, 100, 102, 104, 106, 108, 110, 112, 114, 116, 118, 120, 122, 124, 126, 128, 130, 132, 134, 136, 138, 140, 142, 144, 146, 148, 150, 152, 154, 156, 158, 160, 162, 164, 166, 168, 170, 172, 174, 176, 178, 180, 182, 184, 186, 188, 190, 192, 194, 196, 198, 200, 202, 204, 206, 208, 210, 212, 214, 216, 218, 220, 222, 224, 226, 228, 230, 232, 234, 236, 238, 240, 242, 244, 246, 248, 250, 252, 254, 256, 258, 260, 262, 264, 266, 268, 270, 272, 274, 276, 278, 280, 282, 284, 286, 288, 290, 292, 294, 296, 298, 300, 302, 304, 306, 308, 310, 312, 314, 316, 318, 320, 322, 324, 326, 328, 330, 332, 334, 336, 338, 340, 342, 344, 346, 348, 350, 352, 354, 356, 358, 360, 362, 364, 366, 368, 370, 372, 374, 376, 380, 382, 384, 386, 448, 449, 450, 451, 452, 453, 454, 455, 456, 457, 458, 459, 460, 461, 462, 463, 464, 465, 466, 467, 468, 469, 470, 471, 472, 473, 474, 475, 476, 477, 478, 479, 480, 481, 482, 483, 484, 485, 486, 487, 488, 489, 490, 491, 492, 493, 494, 495, 496, 497, 498, 499, 500, 501, 503, 504, 505, 506, 507, 508, 509, 510, 511, 512, 513, 514, 515, 516, 517, 519, 520, 521, 522, 523, 524, 525, 528, 529, 530, 531, 532, 533, 534, 535, 536, 537, 538, 539, 540, and fragments thereof.

[0990] Embodiment 7. The self-replicating RNA molecule of any one of the previous embodiments, wherein the RNA corresponds to one or more polynucleotides selected from the group consisting of SEQ ID NOs: 1000, 1002, 276, 382, 334, 338, 270, 254, 310, 326, 272, 306, 252, 246, 262, 266, 318, 256, 278, 298, 286, 448, 450, 453, 455, 380, 344, 212, 350, 214, 216, 222, 220, 226, 346, 354, 236, 224, 168, 172, 20, 24, 178, and fragments thereof.

[0991] Embodiment 8. The self-replicating RNA molecule of any one of the previous embodiments, comprising one or more of the following:
[0992] a. one or more nonstructural genes nsP1, nsP2, nsP3, and nsP4;
[0993] b. at least one of a DLP motif, a 5′ UTR, a 3′UTR, and a Poly A;
[0994] c. a subgenomic promoter; and
[0995] d. a RNA encoding one or more polypeptide selected from the group consisting of SEQ ID NOs: 1001, 1003, 275, 381, 333, 337, 269, 253, 309, 325, 271, 305, 251, 245, 261, 265, 317, 255, 277, 297, 285, 437, 439, 442, 444, 379, 343, 211, 349, 213, 215, 221, 219, 225, 345, 353, 235, 223, 167, 171, 19, 23, 177, and fragments thereof; operably linked to the subgenomic promoter.

[0996] Embodiment 9. The self-replicating RNA molecule of any one of the previous embodiments, comprising one or more of the following:
[0997] a. one or more nonstructural genes nsP1, nsP2, nsP3, and nsP4;
[0998] b. at least one of a DLP motif, 5′ UTR, a 3′UTR, and a Poly A;
[0999] c. a subgenomic promoter; and
[1000] d. RNA encoding one or more polypeptides selected from the group consisting of SEQ ID NOs: 541, 543, 550, 552, 554, 555, 556, 557, 558, 559, 623, 624, 625, 626, 1004, or 1005, and fragments thereof; operably linked to the subgenomic promoter.

[1001] Embodiment 10. The self-replicating RNA molecule of embodiment 8 or 9, further comprising a coding sequence for an autoprotease peptide.

[1002] Embodiment 11. The self-replicating RNA molecule of embodiment 10, comprising a DLP motif, and a coding sequence for an autoprotease peptide operably linked downstream of the DLP motif and upstream to the polynucleotide encoding the one or more polypeptides.

[1003] Embodiment 12. The self-replicating RNA molecule of embodiment 11, wherein the autoprotease peptide is selected from the group consisting of porcine teschovirus-1 2A (P2A), foot-and-mouth disease virus (FMDV) 2A (F2A), Equine Rhinitis A Virus (ERAV) 2A (E2A), Thosea asigna virus 2A (T2A), cytoplasmic polyhedrosis virus 2A (BmCPV2A), Flacherie Virus 2A (BmIFV2A), and a combination thereof.

[1004] Embodiment 13. The self-replicating RNA molecule of embodiment 12, wherein in autoprotease peptide is porcine teschovirus-1 2A (P2A).

[1005] Embodiment 14. The self-replicating RNA molecule of embodiment 11, wherein the downstream loop (DLP) comprises at least one RNA-stem-loop.

[1006] Embodiment 15. The self-replicating RNA molecule of embodiment 14, wherein the downstream loop is placed upstream of the non-structural protein 1 (nsP1).

[1007] Embodiment 16. The self-replicating of embodiment 15, wherein the downstream loop placed upstream of the non-structural protein 1 (nsP1) is joined to the nsP1 by a porcine teschovirus-1 2A (P2A) ribosome skipping element.

[1008] Embodiment 17. The self-replicating RNA molecule of any one of the previous embodiments, comprising nonstructural genes nsP1, nsP2, nsP3, and nsP4, and wherein the self-replicating RNA molecule does not encode a functional viral structural protein.

[1009] Embodiment 18. The self-replicating RNA molecule of anyone of the previous embodiments, wherein a fragment of the nsP1 is duplicated downstream of the 5′-UTR and upstream of the DLP.

[1010] Embodiment 19. The self-replicating RNA molecule of embodiment 18, wherein the first 193 nucleotides of nsP1 are duplicated downstream of the 5′ UTR and upstream of the DLP.

[1011] Embodiment 20. The self-replicating RNA molecule of any one of the previous embodiments, wherein the self-replicating RNA is an alphavirus-derived RNA replicon.

[1012] Embodiment 21. The self-replicating RNA molecule of embodiment 20, wherein the alphavirus is a Eastern equine encephalitis virus (EEEV), Venezuelan equine encephalitis virus (VEEV), Everglades virus (EVEV), Mucambo virus (MUCV), Semliki forest virus (SFV), Pixuna virus (PIXV), Middleburg virus (MIDV), Chikungunya virus (CHIKV), O'Nyong-Nyong virus (ONNV), Ross River virus (RRV), Barmah Forest virus (BF), Getah virus (GET), Sagiyama virus (SAGV), Bebaru virus (BEBV), Mayaro virus (MAYV), Una virus (UNAV), Sindbis virus (SINV), Aura virus (AURAV), Whataroa virus (WHAV), Babanki virus (BABV), Kyzylagach virus (KYZV), Western equine encephalitis virus (WEEV), Highland J virus (HJV), Fort Morgan virus (FMV), Ndumu (NDUV), and Buggy Creek virus. Virulent and avirulent alphavirus strains are both suitable. In some embodiments, the alphavirus RNA replicon is of a Sindbis virus (SIN), a Semliki Forest virus (SFV), a Ross River virus (RRV), a Venezuelan equine encephalitis virus (VEEV), or an Eastern equine encephalitis virus (EEEV).

[1013] Embodiment 22. The self-replicating RNA molecule of embodiment 21, wherein the alphavirus is a Venezuelan equine encephalitis virus (VEEV).

[1014] Embodiment 23. The self-replicating RNA molecule of embodiment 22, wherein the downstream loop DLP placed upstream of the non-structural protein 1 (nsP1) is derived from Sindbis virus.

[1015] Embodiment 24. The self-replicating RNA molecule of embodiment 23, wherein the self-replicating RNA molecule contains non VEEV nonstructural proteins nsP1, nsP2, nsP3 and nsP4.

[1016] Embodiment 25. A DNA construct comprising the vector of SEQ ID NO: 981 and the self-replicating RNA molecule of any one of the previous embodiments.

[1017] Embodiment 26. A composition comprising the self-replicating RNA molecule of any one of embodiments 1-24 and a pharmaceutically acceptable carrier.

[1018] Embodiment 27. The composition of embodiment 26, wherein the self-replicating RNA molecule is encapsulated in, bound to, or adsorbed on a liposome, a lipoplex, a lipid nanoparticle, or combinations thereof, preferably the self-replicating RNA molecule is encapsulated in a lipid nanoparticle.

[1019] Embodiment 28. The composition of embodiment 27, wherein the lipid nanoparticle comprises an mRNA, a cationic lipid, a phospholipid, cholesterol and/or a conjugated lipid.

[1020] Embodiment 29. The composition of embodiment 28, wherein the cationic lipid comprises a protonatable tertiary amine

[1021] Embodiment 30. The composition of embodiment 29, wherein the cationic lipid is di((Z)-non-2-en-1-yl) 8,8′-((((2-(dimethylamino)ethyl)thio)carbonyl)azanediyl)dioctanoate

[1022] Embodiment 31. The composition of any one of embodiment 28, wherein the conjugated lipid is a PEG-lipid.

[1023] Embodiment 32. The composition of embodiment 31, wherein the conjugated lipid is a DMG-PEG-2000.

[1024] Embodiment 33. The composition of embodiment 28, wherein the phospholipid is DSPC.

[1025] Embodiment 34. The composition of embodiment 28, wherein the lipid nanoparticle comprises a cationic lipid, a zwitterion lipid, a cholesterol, and a conjugated lipid combined in a molar ratio of 50:7:40:3, respectively.

[1026] Embodiment 35. A polynucleotide encoding one or more polypeptides selected from the group consisting of SEQ ID NOs: 1001, 1003, 275, 381, 333, 337, 269, 253, 309, 325, 271, 305, 251, 245, 261, 265, 317, 255, 277, 297, 285, 437, 439, 442, 444, 379, 343, 211, 349, 213, 215, 221, 219, 225, 345, 353, 235, 223, 167, 171, 19, 23, 177, and fragments thereof.

[1027] Embodiment 36. The polynucleotide of embodiment 35, encoding a polypeptide of SEQ ID NOs: 541, 543, 550, 552, 554, 555, 556, 557, 558, 559, 623, or 624, 625, 626, 1004, or 1005.

[1028] Embodiment 37. The polynucleotide of embodiment 35 or 36, comprising the nucleotide sequence of one or more of SEQ ID NOs: 1000, 1002, 276, 382, 334, 338, 270, 254, 310, 326, 272, 306, 252, 246, 262, 266, 318, 256, 278, 298, 286, 448, 450, 453, 455, 380, 344, 212, 350, 214, 216, 222, 220, 226, 346, 354, 236, 224, 168, 172, 20, 24, 178, and fragments thereof.

[1029] Embodiment 38. A recombinant virus encoding the polynucleotide of any one of embodiments 35-37.

[1030] Embodiment 39. The recombinant virus of embodiment 38, wherein the recombinant virus is derived from GAd20, Ad26, or MVA.

[1031] Embodiment 40. The recombinant virus of embodiment 39, wherein the first vaccine is Ad26

[1032] Embodiment 41. The recombinant virus of embodiment 39, wherein the first vaccine is Gad20.

[1033] Embodiment 42. The recombinant virus of embodiment 39, wherein the first vaccine is MVA.

[1034] Embodiment 43. A kit comprising the self-replicating RNA molecule of any one of embodiments 1-24, the DNA construct of embodiment 25, the composition of any one of embodiments 26-34, the polynucleotide of any one of embodiments 35-37, or the recombinant virus of any one of embodiments 38-42, and instructions for using the kit in treating a prostate cancer in a subject in need thereof.

[1035] Embodiment 44. A method of immunizing an individual, comprising administering to the individual in need thereof the self-replicating RNA molecule of any one of embodiments 1-24, the DNA construct of embodiment 25, the composition of any one of embodiments 26-34, the polynucleotide of any one of embodiments 35-37, or the recombinant virus of any one of embodiments 38-42.

[1036] Embodiment 45. A method of treating or preventing prostate cancer in a subject, comprising administering to the subject the self-replicating RNA molecule of any one of embodiments 1-24, the DNA construct of embodiment 25, the composition of any one of embodiments 26-34, the polynucleotide of any one of embodiments 35-37, or the recombinant virus of any one of embodiments 38-42.

[1037] Embodiment 46. The method of embodiment 45, wherein the prostate cancer is a relapsed prostate cancer, a refractory prostate cancer, a metastatic prostate cancer, a castration resistant prostate cancer, or any combination thereof.

[1038] Embodiment 47. The method of embodiment 45, wherein the subject is treatment naïve.

[1039] Embodiment 48. The method of any one of embodiments 44-46, wherein the subject has received androgen deprivation therapy.

[1040] Embodiment 49. The method of any one of embodiments 44-48, wherein the subject has an elevated level of prostate specific antigen (PSA).

[1041] Embodiment 50. The method of any one of embodiments 44-49, comprising administering an additional cancer therapeutic agent to the subject.

[1042] Embodiment 51. The method of embodiment 50, wherein the additional cancer therapeutic agent is a surgery, a chemotherapy, an androgen deprivation therapy, radiation, a checkpoint inhibitor, a targeted therapy, or any combination thereof.

[1043] Embodiment 52. The method of embodiment 51, wherein the additional cancer therapeutic agent is a CTLA-4 antibody, a CTLA4 ligand, a PD-1 axis inhibitor, a PD-L1 axis inhibitor, a TLR agonist, a CD40 agonist, an OX40 agonist, hydroxyurea, ruxolitinib, fedratinib, a 41BB agonist, aa CD28 agonist, a STING antagonist, a RIG-1 antagonist, TCR-T therapy, CAR-T therapy, FLT3 ligand, aluminum sulfate, BTK inhibitor, CD38 antibody, CDK inhibitor, CD33 antibody, CD37 antibody, CD25 antibody, GM-CSF inhibitor, IL-2, IL-15, IL-7, CD3 redirection molecules, pomalimib, IFNγ, IFNα, TNFα, VEGF antibody, CD70 antibody, CD27 antibody, BCMA antibody or GPRC5D antibody, or any combination thereof.

[1044] Embodiment 53. The method of embodiment 51, wherein the checkpoint inhibitor is ipilimumab, cetrelimab, pembrolizumab, nivolumab, sintilimab. cemiplimab, toripalimab, camrelizumab, tislelizumab, dostralimab, spartalizumab, prolgolimab, balstilimab, budigalimab, sasanlimab, avelumab, atezolizumab, durvalumab, envafolimab, or iodapolimab, or any combination thereof.

[1045] Embodiment 54. A method of treating or preventing a prostate cancer in a subject, comprising administering to the subject
[1046] a. a first vaccine comprising a polynucleotide or RNA encoding one or more polypeptides selected from the group consisting of SEQ ID NOs: 1001, 1003, 275, 381, 333, 337, 269, 253, 309, 325, 271, 305, 251, 245, 261, 265, 317, 255, 277, 297, 285, 437, 439, 442, 444, 379, 343, 211, 349, 213, 215, 221, 219, 225, 345, 353, 235, 223, 167, 171, 19, 23, 177; and
[1047] b. a second vaccine comprising a polynucleotide or RNA encoding one or more polypeptides selected from the group consisting of SEQ ID NOs: 1001, 1003, 275, 381, 333, 337, 269, 253, 309, 325, 271, 305, 251, 245, 261, 265, 317, 255, 277, 297, 285, 437, 439, 442, 444, 379, 343, 211, 349, 213, 215, 221, 219, 225, 345, 353, 235, 223, 167, 171, 19, 23, 177.

[1048] Embodiment 55. The method of embodiment 54, comprising administering to the subject
[1049] a. a first vaccine comprising a polynucleotide or RNA encoding a polypeptide selected from the group consisting of SEQ ID NOs: 541, 543, 550, 552, 554, 555, 556, 557, 558, 559, 623, 624, 625, 626, 1004 or 1005 and
[1050] b. a second vaccine comprising a polynucleotide or RNA encoding a polypeptide selected from the group consisting of SEQ ID NOs: 541, 543, 550, 552, 554, 555, 556, 557, 558, 559, 623, 624, 625, 626, 1004 or 1005.

[1051] Embodiment 56. The method of embodiment 54 or 55, wherein the first vaccine and the second vaccine are recombinant viruses derived from GAd20, MVA, Ad26, or a self-replicating RNA molecule.

[1052] Embodiment 57. The method of embodiment 56, wherein the first vaccine and the second vaccine are capable of eliciting a cellular immune response in the subject.

[1053] Embodiment 58. The method of embodiment 57, wherein the cellular immune response is specific against one or more fragments of the polypeptide of SEQ ID NOs: 1001, 1003, 275, 381, 333, 337, 269, 253, 309, 325, 271, 305, 251, 245, 261, 265, 317, 255, 277, 297, 285, 437, 439, 442, 444, 379, 343, 211, 349, 213, 215, 221, 219, 225, 345, 353, 235, 223, 167, 171, 19, 23, 177, or any combination thereof.

[1054] Embodiment 59. The method of embodiment 58, wherein the cellular immune response is specific against one or more fragments of the polypeptide of SEQ ID NOs: 541, 543, 550, 552, 554, 555, 556, 557, 558, 559, 623, 624, 625, 626, 1004 or 1005.

[1055] Embodiment 60. The method of any one of embodiments 57-59, wherein the cellular immune response is activation of vaccine-specific CD8⁺ T cells, CD4⁺ T cells, or CD8⁺ T cells and CD4⁺ T cells, wherein activation is assessed by increased production of TNFα, IFNγ, or TNFα and IFNγ by CD8⁺ T cells, CD4⁺ T cells, or CD8⁺ T cells and CD4⁺ T cells.

[1056] Embodiment 61. The method of any one of embodiments 54-60, wherein the first vaccine, the second vaccine, or both the first vaccine and the second vaccine is an RNA vaccine.

[1057] Embodiment 62. The method of embodiment 61, wherein the first vaccine, the second vaccine, or both the first vaccine and the second vaccine is a self-replicating RNA molecule.

[1058] Embodiment 63. The method of embodiment 62, wherein the first vaccine comprises a recombinant virus derived from GAd20, Ad26 or MVA and the second vaccine is a self-replicating RNA molecule.

[1059] Embodiment 64. The method of embodiment 63, wherein the first vaccine is Ad26

[1060] Embodiment 65. The method of embodiment 63, wherein the first vaccine is Gad20.

[1061] Embodiment 66. The method of embodiment 63, wherein the first vaccine is MVA.

[1062] Embodiment 67. The method of embodiments 62, wherein the first vaccine is a self-replicating RNA molecule and the second vaccine is a recombinant virus derived from Ad26, GAd20, or MVA.

[1063] Embodiment 68. The method of embodiment 67, wherein the second vaccine is Ad26.

[1064] Embodiment 69. The method of embodiment 67, wherein the second vaccine is GAd20.

[1065] Embodiment 70. The method of embodiment 67, wherein the second vaccine is MVA.

[1066] Embodiment 71. The method of embodiment 64, wherein the first vaccine is a recombinant virus derived from Ad26 comprising a polynucleotide encoding a polypeptide of SEQ ID NOs: 541, 550, 554, 555, 556, 623, 624, 1004 or 1005 and the second vaccine is a self-replicating RNA molecule comprising a polynucleotide encoding a polypeptide of SEQ ID NOs 541, 543, 550, 552, 554, 555, 556, 557, 558, 559, 623, 624, 625, 626, 1004 or 1005.

[1067] Embodiment 72. The method of embodiment 65, wherein the first vaccine is a recombinant virus derived from GAd20 comprising a polynucleotide encoding a polypeptide of SEQ ID NOs: 541, 550, 554, 555, 556, 623, 624, 1004 or 1005 and the second vaccine is a self-replicating RNA molecule comprising a polynucleotide encoding a polypeptide of SEQ ID NOs 541, 543, 550, 552, 554, 555, 556, 557, 558, 559, 623, 624, 625, 626, 1004 or 1005.

[1068] Embodiment 73. The method of embodiment 66, wherein the first vaccine is a recombinant virus derived from MVA comprising a polynucleotide encoding a polypeptide of SEQ ID NOs: 543, 552, 557, 558, 559, 625, 626, 1004 or 1005 and the second vaccine is a self-replicating RNA molecule comprising a polynucleotide encoding a polypeptide of SEQ ID NOs 541, 543, 550, 552, 554, 555, 556, 557, 558, 559, 623, 624, 625, 626, 1004, or 1005.

[1069] Embodiment 74. The method of embodiment 68, wherein the first vaccine is a self-replicating RNA molecule comprising a polynucleotide encoding a polypeptide of SEQ ID NOs 541, 543, 550, 552, 554, 555, 556, 557, 558, 559, 623, 624, 625, 626, 1004 or 1005 and the second vaccine a recombinant virus derived from Ad26 comprising a polynucleotide encoding a polypeptide of SEQ ID NOs: 541, 550, 554, 555, 556, 623, 624, 1004 or 1005.

[1070] Embodiment 75. The method of embodiment 69, wherein the first vaccine is a self-replicating RNA molecule comprising a polynucleotide encoding a polypeptide of SEQ ID NOs 541, 543, 550, 552, 554, 555, 556, 557, 558, 559, 623, 624, 625, 626, 1004 or 1005 and the second vaccine a recombinant virus derived from GAd20 comprising a polynucleotide encoding a polypeptide of SEQ ID NOs: 541, 550, 554, 555, 556, 623, 624, 1004 or 1005.

[1071] Embodiment 76. The method of embodiment 70, wherein the first vaccine is a self-replicating RNA molecule comprising a polynucleotide encoding a polypeptide of SEQ ID NOs 541, 543, 550, 552, 554, 555, 556, 557, 558, 559, 623, 624, 625, 626, 1004 or 1005 and the second vaccine a recombinant virus derived from MVA comprising a polynucleotide encoding a polypeptide of SEQ ID NOs: 543, 552, 557, 558, 559, 625, 626, 1004 or 1005.

[1072] Embodiment 77. The method of any of embodiments 56-76, wherein the self-replicating RNA molecule is an alphavirus.

[1073] Embodiment 78. The method of embodiment 77, wherein the alphavirus is derived from Eastern equine encephalitis virus (EEEV), Venezuelan equine encephalitis virus (VEEV), Everglades virus (EVEV), Mucambo virus (MUCV), Semliki forest virus (SFV), Pixuna virus (PIXV), Middleburg virus (MIDV), Chikungunya virus (CHIKV), O'Nyong-Nyong virus (ONNV), Ross River virus (RRV), Barmah Forest virus (BF), Getah virus (GET), Sagiyama virus (SAGV), Bebaru virus (BEBV), Mayaro virus (MAYV), Una virus (UNAV), Sindbis virus (SINV), Aura virus (AURAV), Whataroa virus (WHAV), Babanki virus (BABV), Kyzylagach virus (KYZV), Western equine encephalitis virus (WEEV), Highland J virus (HJV), Fort Morgan virus (FMV), Ndumu (NDUV), and Buggy Creek virus. Virulent and avirulent alphavirus strains are both suitable. In some embodiments, the alphavirus RNA replicon is of a Sindbis virus (SIN), a Semliki Forest virus (SFV), a Ross River virus (RRV), a Venezuelan equine encephalitis virus (VEEV), or an Eastern equine encephalitis virus (EEEV).

[1074] Embodiment 79. The method of embodiment 78, wherein the alphavirus is a Venezuelan equine encephalitis virus (VEEV)

[1075] Embodiment 80. The method of any one of embodiments 54-79, wherein the subject has, is suspected to have, or is suspected to develop prostate cancer.

[1076] Embodiment 81. The method of any one of embodiments 54-80, wherein the prostate cancer is a relapsed prostate cancer, a refractory prostate cancer, a metastatic prostate cancer or a castration resistant prostate cancer, or any combination thereof

[1077] Embodiment 82. The method of any one of embodiments 54-81, wherein the subject is treatment naïve.

[1078] Embodiment 83. The method of any one of embodiments 54-81, wherein the subject has received androgen deprivation therapy.

[1079] Embodiment 84. The method of any one of embodiments 54-83, wherein the subject has an elevated level of PSA.

[1080] Embodiment 85. The method of any one of embodiments 54-84, comprising administering an additional cancer therapeutic agent to the subject.

[1081] Embodiment 86. The method of embodiment 85, wherein the additional cancer therapeutic agent is a surgery, a chemotherapy, an androgen deprivation therapy, radiation, a checkpoint inhibitor, a targeted therapy, or any combination thereof.

[1082] Embodiment 87. The method of embodiment 86, wherein the additional cancer therapeutic agent is a CTLA-4 antibody, a CTLA4 ligand, a PD-1 axis inhibitor, a PD-L1 axis inhibitor, a TLR agonist, a CD40 agonist, an OX40 agonist, hydroxyurea, ruxolitinib, fedratinib, a 41BB agonist, aa CD28 agonist, a STING antagonist, a RIG-1 antagonist, TCR-T therapy, CAR-T therapy, FLT3 ligand, aluminum sulfate, BTK inhibitor, CD38 antibody, CDK inhibitor, CD33 antibody, CD37 antibody, CD25 antibody, GM-CSF inhibitor, IL-2, IL-15, IL-7, CD3 redirection molecules, pomalimib, IFNγ, IFNα, TNFα, VEGF antibody, CD70 antibody, CD27 antibody, BCMA antibody or GPRC5D antibody or any combination thereof.

[1083] Embodiment 88. The method of embodiment 86, wherein the checkpoint inhibitor is ipilimumab, cetrelimab, pembrolizumab, nivolumab, sintilimab. cemiplimab, toripalimab, camrelizumab, tislelizumab, dostralimab, spartalizumab, prolgolimab, balstilimab, budigalimab, sasanlimab, avelumab, atezolizumab, durvalumab, envafolimab, or iodapolimab, or any combination thereof.

[1084] Embodiment 89. The method of any one of embodiments 54-88, wherein the first vaccine is administered one or more times to the subject.

[1085] Embodiment 90. The method of any one of embodiments 54-88, wherein the second vaccine is administered one or more times to the subject.

[1086] Embodiment 91. The method any one of embodiments 54-90, wherein the first vaccine is administered between about 1-16 weeks prior to administering the second vaccine.

1. A self-replicating RNA molecule comprising an RNA encoding a polypeptide of SEQ ID NO: 1001, 1003, or a combination thereof.

2. The self-replicating RNA molecule of claim 1, wherein the RNA corresponds to a polynucleotide of SEQ ID NO: 1000, 1002, or a combination thereof.

3. (canceled)

4. The self-replicating RNA molecule of claim 1, wherein the self-replicating RNA molecule comprises an RNA encoding a one or more polypeptides selected from the group consisting of SEQ ID NOs: 1001, 1003, 275, 381, 333, 337, 269, 253, 309, 325, 271, 305, 251, 245, 261, 265, 317, 255, 277, 297, 285, 437, 439, 442, 444, 379, 343, 211, 349, 213, 215, 221, 219, 225, 345, 353, 235, 223, 167, 171, 19, 23, 177, and fragments thereof.

5. The self-replicating RNA molecule of claim 4, comprising an RNA encoding a polypeptide of SEQ ID NOs: 1004, 1005, 541, 543, 550, 552, 554, 555, 556, 557, 558, 559, 623, 624, 625, or 626.

6-7. (canceled)

8. The self-replicating RNA molecule of claim 1, comprising one or more of the following:
a. one or more nonstructural genes nsP1, nsP2, nsP3, and nsP4;
b. at least one of a DLP motif, a 5′ UTR, a 3′UTR, and a Poly A;
c. a subgenomic promoter; and
d. a RNA encoding one or more polypeptide selected from the group consisting of SEQ ID NOs: 1001, 1003, 275, 381, 333, 337, 269, 253, 309, 325, 271, 305, 251, 245, 261, 265, 317, 255, 277, 297, 285, 437, 439, 442, 444, 379, 343, 211, 349, 213, 215, 221, 219, 225, 345, 353, 235, 223, 167, 171, 19, 23, 177, and fragments thereof; operably linked to the subgenomic promoter.

9. The self-replicating RNA molecule of claim 1, comprising one or more of the following:
a. one or more nonstructural genes nsP1, nsP2, nsP3, and nsP4;
b. at least one of a DLP motif, 5′ UTR, a 3′UTR, and a Poly A;
c. a subgenomic promoter; and
d. RNA encoding one or more polypeptides selected from the group consisting of SEQ ID NOs: 1004, 1005, 541, 543, 550, 552, 554, 555, 556, 557, 558, 559, 623, 624, 625, or 626, and fragments thereof; operably linked to the subgenomic promoter.

10-24. (canceled)

25. A DNA construct comprising the vector of SEQ ID NO: 981 and the self-replicating RNA molecule of claim 5.

26. A composition comprising the self-replicating RNA molecule of claim 5 and a pharmaceutically acceptable carrier.

27. The composition of claim 26, wherein the self-replicating RNA molecule is encapsulated in, bound to, or adsorbed on a liposome, a lipoplex, a lipid nanoparticle, or combinations thereof, preferably the self-replicating RNA molecule is encapsulated in a lipid nanoparticle.

28-34. (canceled)

35. A polynucleotide encoding one or more polypeptides selected from the group consisting of SEQ ID NOs: 1001, 1003, 275, 381, 333, 337, 269, 253, 309, 325, 271, 305, 251, 245, 261, 265, 317, 255, 277, 297, 285, 437, 439, 442, 444, 379, 343, 211, 349, 213, 215, 221, 219, 225, 345, 353, 235, 223, 167, 171, 19, 23, 177, and fragments thereof.

36. The polynucleotide of claim 35, encoding a polypeptide of SEQ ID NOs: 541, 543, 550, 552, 554, 555, 556, 557, 558, 559, 623, 624, 625, 626, 1004, or 1005.

37. The polynucleotide of claim 35, comprising the nucleotide sequence of one or more of SEQ ID NOs: 1000, 1002, 276, 382, 334, 338, 270, 254, 310, 326, 272, 306, 252, 246, 262, 266, 318, 256, 278, 298, 286, 448, 450, 453, 455, 380, 344, 212, 350, 214, 216, 222, 220, 226, 346, 354, 236, 224, 168, 172, 20, 24, 178, and fragments thereof.

38. A recombinant virus encoding the polynucleotide of claim 36.

39. The recombinant virus of claim 38, wherein the recombinant virus is derived from GAd20, Ad26, or MVA.

40-44. (canceled)

45. A method of treating or preventing prostate cancer in a subject, the method comprising administering to the subject the recombinant virus of claim 38.

46. The method of claim 45, wherein the prostate cancer is a relapsed prostate cancer, a refractory prostate cancer, a metastatic prostate cancer, a castration resistant prostate cancer, or any combination thereof.

47-51. (canceled)

52. The method of claim 51, wherein the additional cancer therapeutic agent is a CTLA-4 antibody, a CTLA4 ligand, a PD-1 axis inhibitor, a PD-L1 axis inhibitor, a TLR agonist, a CD40 agonist, an OX40 agonist, hydroxyurea, ruxolitinib, fedratinib, a 41BB agonist, aa CD28 agonist, a STING antagonist, a RIG-1 antagonist, TCR-T therapy, CAR-T therapy, FLT3 ligand, aluminum sulfate, BTK inhibitor, CD38 antibody, CDK inhibitor, CD33 antibody, CD37 antibody, CD25 antibody, GM-CSF inhibitor, IL-2, IL-15, IL-7, CD3 redirection molecules, pomalimib, IFNγ, IFNα, TNFα, VEGF antibody, CD70 antibody, CD27 antibody, BCMA antibody or GPRC5D antibody, or any combination thereof.

53. The method of claim 51, wherein the checkpoint inhibitor is ipilimumab, cetrelimab, pembrolizumab, nivolumab, cemiplimab, toripalimab, camrelizumab, tislelizumab, dostralimab, spartalizumab, prolgolimab, balstilimab, budigalimab, sasanlimab, avelumab, atezolizumab, durvalumab, envafolimab, or iodapolimab, or any combination thereof.

54. A method of treating or preventing a prostate cancer in a subject, comprising administering to the subject
a. a first vaccine comprising a polynucleotide or RNA encoding one or more polypeptides selected from the group consisting of SEQ ID NOs: 1001, 1003, 275, 381, 333, 337, 269, 253, 309, 325, 271, 305, 251, 245, 261, 265, 317, 255, 277, 297, 285, 437, 439, 442, 444, 379, 343, 211, 349, 213, 215, 221, 219, 225, 345, 353, 235, 223, 167, 171, 19, 23, 177; and
b. a second vaccine comprising a polynucleotide or RNA encoding one or more polypeptides selected from the group consisting of SEQ ID NOs: 1001, 1003, 275, 381, 333, 337, 269, 253, 309, 325, 271, 305, 251, 245, 261, 265, 317, 255, 277, 297, 285, 437, 439, 442, 444, 379, 343, 211, 349, 213, 215, 221, 219, 225, 345, 353, 235, 223, 167, 171, 19, 23, 177.

55. The method of claim 54, comprising administering to the subject
a. a first vaccine comprising a polynucleotide or RNA encoding a polypeptide selected from the group consisting of SEQ ID NOs:1004, 1005, 541, 543, 550, 552, 554, 555, 556, 557, 558, 559, 623, 624, 625, or 626, and
b. a second vaccine comprising a polynucleotide or RNA encoding a polypeptide selected from the group consisting of SEQ ID NOs: 1004, 1005, 541, 543, 550, 552, 554, 555, 556, 557, 558, 559, 623, 624, 625, or 626.

56. The method of claim 54, wherein the first vaccine and the second vaccine are recombinant viruses derived from GAd20, MVA, Ad26, or a self-replicating RNA molecule.

57-60. (canceled)

61. The method of claim 54, wherein the first vaccine, the second vaccine, or both the first vaccine and the second vaccine is an RNA vaccine.

62. The method of claim 61, wherein the first vaccine, the second vaccine, or both the first vaccine and the second vaccine is a self-replicating RNA molecule.

63. The method of claim 62, wherein the first vaccine comprises a recombinant virus derived from GAd20, Ad26 or MVA and the second vaccine is a self-replicating RNA molecule.

64-66. (canceled)

67. The method of claim 62, wherein the first vaccine is a self-replicating RNA molecule and the second vaccine is a recombinant virus derived from Ad26, GAd20, or MVA.

68-70. (canceled)

71. The method of claim 63, wherein the first vaccine is a recombinant virus derived from Ad26 comprising a polynucleotide encoding a polypeptide of SEQ ID NOs: 541, 550, 554, 555, 556, 623, 624, 1004 or 1005 and the second vaccine is a self-replicating RNA molecule comprising a polynucleotide encoding a polypeptide of SEQ ID NOs 541, 543, 550, 552, 554, 555, 556, 557, 558, 559, 623, 624, 625, 626, 1004 or 1005.

72. The method of claim 63, wherein the first vaccine is a recombinant virus derived from GAd20 comprising a polynucleotide encoding a polypeptide of SEQ ID NOs: 541, 550, 554, 555, 556, 623, 624, 1004 or 1005 and the second vaccine is a self-replicating RNA molecule comprising a polynucleotide encoding a polypeptide of SEQ ID NOs 541, 543, 550, 552, 554, 555, 556, 557, 558, 559, 623, 624, 625, 626, 1004 or 1005.

73. The method of claim 63, wherein the first vaccine is a recombinant virus derived from MVA comprising a polynucleotide encoding a polypeptide of SEQ ID NOs: 543, 552, 557, 558, 559, 625, 626, 1004 or 1005 and the second vaccine is a self-replicating RNA molecule comprising a polynucleotide encoding a polypeptide of SEQ ID NOs 541, 543, 550, 552, 554, 555, 556, 557, 558, 559, 623, 624, 625, 626, 1004, or 1005.

74. The method of claim 67, wherein the first vaccine is a self-replicating RNA molecule comprising a polynucleotide encoding a polypeptide of SEQ ID NOs 541, 543, 550, 552, 554, 555, 556, 557, 558, 559, 623, 624, 625, 626, 1004 or 1005 and the second vaccine a recombinant virus derived from Ad26 comprising a polynucleotide encoding a polypeptide of SEQ ID NOs: 541, 550, 554, 555, 556, 623, 624, 1004 or 1005.

75. The method of claim 67, wherein the first vaccine is a self-replicating RNA molecule comprising a polynucleotide encoding a polypeptide of SEQ ID NOs 541, 543, 550, 552, 554, 555, 556, 557, 558, 559, 623, 624, 625, 626, 1004 or 1005 and the second vaccine a recombinant virus derived from GAd20 comprising a polynucleotide encoding a polypeptide of SEQ ID NOs: 541, 550, 554, 555, 556, 623, 624, 1004 or 1005.

76. The method of claim 67, wherein the first vaccine is a self-replicating RNA molecule comprising a polynucleotide encoding a polypeptide of SEQ ID NOs 541, 543, 550, 552, 554, 555, 556, 557, 558, 559, 623, 624, 625, 626, 1004 or 1005 and the second vaccine a recombinant virus derived from MVA comprising a polynucleotide encoding a polypeptide of SEQ ID NOs: 543, 552, 557, 558, 559, 625, 626, 1004 or 1005.

77-86. (canceled)

87. The method of claim 54, further comprising an additional cancer therapeutic agent selected from the group consisting of a CTLA-4 antibody, a CTLA4 ligand, a PD-1 axis inhibitor, a PD-L1 axis inhibitor, a TLR agonist, a CD40 agonist, an OX40 agonist, hydroxyurea, ruxolitinib, fedratinib, a 41BB agonist, a CD28 agonist, a STING antagonist, a RIG-1 antagonist, TCR-T therapy, CAR-T therapy, FLT3 ligand, aluminum sulfate, BTK inhibitor, CD38 antibody, CDK inhibitor, CD33 antibody, CD37 antibody, CD25 antibody, GM-CSF inhibitor, IL-2, IL-15, IL-7, CD3 redirection molecules, pomalimib, IFNγ, IFNα, TNFα, VEGF antibody, CD70 antibody, CD27 antibody, BCMA antibody or GPRC5D antibody or any combination thereof.

88. The method of claim 54, further comprising a checkpoint inhibitor selected from the group consisting of ipilimumab, cetrelimab, pembrolizumab, nivolumab, sintilimab, cemiplimab, toripalimab, camrelizumab, tislelizumab, dostralimab, spartalizumab, prolgolimab, balstilimab, budigalimab, sasanlimab, avelumab, atezolizumab, durvalumab, envafolimab, or iodapolimab, or any combination thereof.

89-91. (canceled)

The application's sequence listing, which the Patent Office published only in electronic form, follows.

SEQUENCE LISTING (1005 sequences)

SEQ ID NO: 1 - protein, 17 aa, Homo sapiens
SSCMGGMNQRPILTIIT

SEQ ID NO: 2 - DNA, 51 bp, Homo sapiens
agttcctgcatgggcggcatgaaccagaggcccatcctcaccatcatcaca

SEQ ID NO: 3 - protein, 17 aa, Homo sapiens
SSCMGGMNWRPILTIIT

SEQ ID NO: 4 - DNA, 51 bp, Homo sapiens
agttcctgcatgggcggcatgaattggaggcccatcctcaccatcatcaca

SEQ ID NO: 5 - protein, 17 aa, Homo sapiens
LGRNSFEVCVCACPGRD

SEQ ID NO: 6 - DNA, 51 bp, Homo sapiens
ctgggacggaacagctttgaggtgtgtgtttgtgcctgtcctgggagagac

SEQ ID NO: 7 - protein, 17 aa, Homo sapiens
LGRNSFEVLVCACPGRD

SEQ ID NO: 8 - DNA, 51 bp, Homo sapiens
ctgggacggaacagctttgaggtgcttgtttgtgcctgtcctgggagagac

SEQ ID NO: 9 - protein, 17 aa, Homo sapiens
MCNSSCMGSMNRRPILT

SEQ ID NO: 10 - DNA, 51 bp, Homo sapiens
atgtgtaacagttcctgcatgggcagcatgaaccggaggcccatcctcacc

SEQ ID NO: 11 - protein, 17 aa, Homo sapiens
FRHSVVVPCEPPEVGSD

SEQ ID NO: 12 - DNA, 51 bp, Homo sapiens
tttcgacatagtgtggtggtgccctgtgagccgcctgaggttggctctgac

SEQ ID NO: 13 - protein, 17 aa, Homo sapiens
VCACPGRDWRTEEENLR

SEQ ID NO: 14 - DNA, 51 bp, Homo sapiens
gtttgtgcctgtcctgggagagattggcgcacagaggaagagaatctccgc

SEQ ID NO: 15 - protein, 17 aa, Homo sapiens
FVQGKDWGCKKFIRRDF

SEQ ID NO: 16 - DNA, 51 bp, Homo sapiens
tttgtgcaaggcaaagactggggatgcaagaaattcatccgtagagatttt

SEQ ID NO: 17 - protein, 17 aa, Homo sapiens
FVQGKDWGIKKFIRRDF

SEQ ID NO: 18 - DNA, 51 bp, Homo sapiens
tttgtgcaaggcaaagactggggaatcaagaaattcatccgtagagatttt

SEQ ID NO: 19 - protein, 17 aa, Homo sapiens
FVQGKDWGLKKFIRRDF

SEQ ID NO: 20 - DNA, 51 bp, Homo sapiens
tttgtgcaaggcaaagactggggattaaagaaattcatccgtagagatttt

SEQ ID NO: 21 - protein, 17 aa, Homo sapiens
FVQGKDWGSKKFIRRDF

SEQ ID NO: 22 - DNA, 51 bp, Homo sapiens
tttgtgcaaggcaaagactggggatccaagaaattcatccgtagagatttt

SEQ ID NO: 23 - protein, 17 aa, Homo sapiens
FVQGKDWGVKKFIRRDF

SEQ ID NO: 24 - DNA, 51 bp, Homo sapiens
tttgtgcaaggcaaagactggggagtcaagaaattcatccgtagagatttt

SEQ ID NO: 25 - protein, 17 aa, Homo sapiens
YRFVQGKDCGFKKFIRR

SEQ ID NO: 26 - DNA, 51 bp, Homo sapiens
tataggtttgtgcaaggcaaagactgtggattcaagaaattcatccgtaga

SEQ ID NO: 27 - protein, 17 aa, Homo sapiens
YRFVQGKDGGFKKFIRR

SEQ ID NO: 28 - DNA, 51 bp, Homo sapiens
tataggtttgtgcaaggcaaagacgggggattcaagaaattcatccgtaga

SEQ ID NO: 29 - protein, 17 aa, Homo sapiens
YRFVQGKDLGFKKFIRR

SEQ ID NO: 30 - DNA, 51 bp, Homo sapiens
tataggtttgtgcaaggcaaagactggggattcaagaaattcatccgtaga

SEQ ID NO: 31 - protein, 17 aa, Homo sapiens
YRFVQGKDRGFKKFIRR

SEQ ID NO: 32 - DNA, 51 bp, Homo sapiens
tataggtttgtgcaaggcaaagaccggggattcaagaaattcatccgtaga

SEQ ID NO: 33 - protein, 17 aa, Homo sapiens
YRFVQGKDSGFKKFIRR

SEQ ID NO: 34 - DNA, 51 bp, Homo sapiens
tataggtttgtgcaaggcaaagactcgggattcaagaaattcatccgtaga

SEQ ID NO: 35 - protein, 17 aa, Homo sapiens
YPVGYEATHIYWSLRTN

SEQ ID NO: 36 - DNA, 51 bp, Homo sapiens
tatcccgtgggctacgaggccacgcacatctattggagcctccgcaccaac

SEQ ID NO: 37 - protein, 17 aa, Homo sapiens
MFENGCYLCRQKRFKCE

SEQ ID NO: 38 - DNA, 51 bp, Homo sapiens
atgttcgagaacggctgctacttgtgccgccagaagcgcttcaagtgcgag

SEQ ID NO: 39 - protein, 17 aa, Homo sapiens
GKGSYWTLQPDSGNMFE

SEQ ID NO: 40 - DNA, 51 bp, Homo sapiens
ggcaagggctcctactggacgctgcagccggactccggcaacatgttcgag

SEQ ID NO: 41 - protein, 17 aa, Homo sapiens
GKGSYWTLLPDSGNMFE

SEQ ID NO: 42 - DNA, 51 bp, Homo sapiens
ggcaagggctcctactggacgctgctcccggactccggcaacatgttcgag

SEQ ID NO: 43 - protein, 17 aa, Homo sapiens
GKGSYWTLNPDSGNMFE

SEQ ID NO: 44 - DNA, 51 bp, Homo sapiens
ggcaagggctcctactggacgctgaacccggactccggcaacatgttcgag

SEQ ID NO: 45 - protein, 17 aa, Homo sapiens
GKGSYWTLYPDSGNMFE

SEQ ID NO: 46 - DNA, 51 bp, Homo sapiens
ggcaagggctcctactggacgctgtacccggactccggcaacatgttcgag

SEQ ID NO: 47 - protein, 17 aa, Homo sapiens
CYLRRQKRCKCEKQPGA

SEQ ID NO: 48 - DNA, 51 bp, Homo sapiens
tgctacttgcgccgccagaagcgctgcaagtgcgagaagcagccgggggcc

SEQ ID NO: 49 - protein, 17 aa, Homo sapiens
CYLRRQKRSKCEKQPGA

SEQ ID NO: 50 - DNA, 51 bp, Homo sapiens
tgctacttgcgccgccagaagcgctccaagtgcgagaagcagccgggggcc

SEQ ID NO: 51 - protein, 17 aa, Homo sapiens
IRHSLSFNGCFVKVARS

SEQ ID NO: 52 - DNA, 51 bp, Homo sapiens
atccgccactcgctgtccttcaatggctgcttcgtcaaggtggcacgctcc

SEQ ID NO: 53 - protein, 17 aa, Homo sapiens
IRHSLSFNNCFVKVARS

SEQ ID NO: 54 - DNA, 51 bp, Homo sapiens
atccgccactcgctgtccttcaataactgcttcgtcaaggtggcacgctcc

SEQ ID NO: 55 - protein, 17 aa, Homo sapiens
QQRWQNSICHSLSFNDC

SEQ ID NO: 56 - DNA, 51 bp, Homo sapiens
cagcagcgctggcagaactccatctgccactcgctgtccttcaatgactgc

SEQ ID NO: 57 - protein, 17 aa, Homo sapiens
QQRWQNSISHSLSFNDC

SEQ ID NO: 58 - DNA, 51 bp, Homo sapiens
cagcagcgctggcagaactccatcagccactcgctgtccttcaatgactgc

SEQ ID NO: 59 - protein, 17 aa, Homo sapiens
TLHPDSGNKFENGCYLR

SEQ ID NO: 60 - DNA, 51 bp, Homo sapiens
acgctgcacccggactccggcaacaagttcgagaacggctgctacttgcgc

SEQ ID NO: 61 - protein, 17 aa, Homo sapiens
TLHPDSGNRFENGCYLR

SEQ ID NO: 62 - DNA, 51 bp, Homo sapiens
acgctgcacccggactccggcaacaggttcgagaacggctgctacttgcgc

SEQ ID NO: 63 - protein, 17 aa, Homo sapiens
CHKKNFLHWDIKCSNIL

SEQ ID NO: 64 - DNA, 51 bp, Homo sapiens
tgtcacaaaaagaatttcctgcattgggatattaagtgttctaacattttg

SEQ ID NO: 65 - protein, 17 aa, Homo sapiens
IHCKAGKGQTGVMICAY

SEQ ID NO: 66 - DNA, 51 bp, Homo sapiens
attcactgtaaagctggaaagggacaaactggtgtaatgatatgtgcatat

SEQ ID NO: 67 - protein, 17 aa, Homo sapiens
WLSEDDNHFAAIHCKAG

SEQ ID NO: 68 - DNA, 51 bp, Homo sapiens
tggctaagtgaagatgacaatcattttgcagcaattcactgtaaagctgga

SEQ ID NO: 69 - protein, 17 aa, Homo sapiens
GLGDRHVQSILINEQSA

SEQ ID NO: 70 - DNA, 51 bp, Homo sapiens
ggacttggtgatagacatgtacagagtatcttgataaatgagcagtcagca

SEQ ID NO: 71 - protein, 17 aa, Homo sapiens
GLGDRHVQKILINEQSA

SEQ ID NO: 72 - DNA, 51 bp, Homo sapiens
ggacttggtgatagacatgtacagaaaatcttgataaatgagcagtcagca

SEQ ID NO: 73 - protein, 17 aa, Homo sapiens
NINIGPGDSEWFVVPEG

SEQ ID NO: 74 - DNA, 51 bp, Homo sapiens
aacataaatattggcccaggtgactctgaatggtttgttgttcctgaaggt

SEQ ID NO: 75 - protein, 17 aa, Homo sapiens
NINIGPGDYEWFVVPEG

SEQ ID NO: 76 - DNA, 51 bp, Homo sapiens
aacataaatattggcccaggtgactatgaatggtttgttgttcctgaaggt

SEQ ID NO: 77 - protein, 17 aa, Homo sapiens
FMKQMNDARHGGWTTKM

SEQ ID NO: 78 - DNA, 51 bp, Homo sapiens
ttcatgaaacaaatgaatgatgcacgtcatggtggctggacaacaaaaatg

SEQ ID NO: 79 - protein, 17 aa, Homo sapiens
RDPLSEITKQEKDFLWS

SEQ ID NO: 80 - DNA, 51 bp, Homo sapiens
cgagatcctctctctgaaatcactaagcaggagaaagattttctatggagt

SEQ ID NO: 81 - protein, 17 aa, Homo sapiens
RDPLSEITGQEKDFLWS

SEQ ID NO: 82 - DNA, 51 bp, Homo sapiens
cgagatcctctctctgaaatcactgggcaggagaaagattttctatggagt

SEQ ID NO: 83 - protein, 17 aa, Homo sapiens
RDPLSEITAQEKDFLWS

SEQ ID NO: 84 - DNA, 51 bp, Homo sapiens
cgagatcctctctctgaaatcactgcgcaggagaaagattttctatggagt

SEQ ID NO: 85 - protein, 17 aa, Homo sapiens
SGIHSGATATAPSLSGK

SEQ ID NO: 86 - DNA, 51 bp, Homo sapiens
tctggaatccattctggtgccactgccacagctccttctctgagtggtaaa

SEQ ID NO: 87 - protein, 17 aa, Homo sapiens
HWQQQSYLASGIHSGAT

SEQ ID NO: 88 - DNA, 51 bp, Homo sapiens
cactggcagcaacagtcttacctggcctctggaatccattctggtgccact

SEQ ID NO: 89 - protein, 17 aa, Homo sapiens
HWQQQSYLHSGIHSGAT

SEQ ID NO: 90 - DNA, 51 bp, Homo sapiens
cactggcagcaacagtcttacctgcactctggaatccattctggtgccact

SEQ ID NO: 91 - protein, 17 aa, Homo sapiens
HWQQQSYLVSGIHSGAT

SEQ ID NO: 92 - DNA, 51 bp, Homo sapiens
cactggcagcaacagtcttacctggtctctggaatccattctggtgccact

SEQ ID NO: 93 - protein, 17 aa, Homo sapiens
HWQQQSYLYSGIHSGAT

SEQ ID NO: 94 - DNA, 51 bp, Homo sapiens
cactggcagcaacagtcttacctgtactctggaatccattctggtgccact

SEQ ID NO: 95 - protein, 17 aa, Homo sapiens
SYLDSGIHAGATTTAPS

SEQ ID NO: 96 - DNA, 51 bp, Homo sapiens
tcttacctggactctggaatccatgctggtgccactaccacagctccttct

SEQ ID NO: 97 - protein, 17 aa, Homo sapiens
SYLDSGIHCGATTTAPS

SEQ ID NO: 98 - DNA, 51 bp, Homo sapiens
tcttacctggactctggaatccattgtggtgccactaccacagctccttct

SEQ ID NO: 99 - protein, 17 aa, Homo sapiens
SYLDSGIHFGATTTAPS

SEQ ID NO: 100 - DNA, 51 bp, Homo sapiens
tcttacctggactctggaatccattttggtgccactaccacagctccttct

SEQ ID NO: 101 - protein, 17 aa, Homo sapiens
SYLDSGIHYGATTTAPS

SEQ ID NO: 102 - DNA, 51 bp, Homo sapiens
tcttacctggactctggaatccattatggtgccactaccacagctccttct

SEQ ID NO: 103 - protein, 17 aa, Homo sapiens
SGATTTAPCLSGKGNPE

SEQ ID NO: 104 - DNA, 51 bp, Homo sapiens
tctggtgccactaccacagctccttgtctgagtggtaaaggcaatcctgag

SEQ ID NO: 105 - protein, 17 aa, Homo sapiens
SGATTTAPFLSGKGNPE

SEQ ID NO: 106 - DNA, 51 bp, Homo sapiens
tctggtgccactaccacagctccttttctgagtggtaaaggcaatcctgag

SEQ ID NO: 107 - protein, 17 aa, Homo sapiens
SGATTTAPPLSGKGNPE

SEQ ID NO: 108 - DNA, 51 bp, Homo sapiens
tctggtgccactaccacagctcctcctctgagtggtaaaggcaatcctgag

SEQ ID NO: 109 - protein, 17 aa, Homo sapiens
YVPSEDYYKPSPYDDLT

SEQ ID NO: 110 - DNA, 51 bp, Homo sapiens
tacgtgcccagtgaggactactacaagccctcaccgtatgatgacctcacc

SEQ ID NO: 111 - protein, 17 aa, Homo sapiens
IRKRLKLCTDFKRTGMD

SEQ ID NO: 112 - DNA, 51 bp, Homo sapiens
atccggaagaggctaaagctctgcactgacttcaaacgcacagggatggat

SEQ ID NO: 113 - protein, 17 aa, Homo sapiens
VDGAVFAVFKAVFVLGD

SEQ ID NO: 114 - DNA, 51 bp, Homo sapiens
gtggatggagccgtgtttgctgttttcaaggctgtgtttgtacttggggat

SEQ ID NO: 115 - protein, 17 aa, Homo sapiens
IVDGAVFAGLKAVFVLG

SEQ ID NO: 116 - DNA, 51 bp, Homo sapiens
atcgtggatggagccgtgtttgctggtctcaaggctgtgtttgtacttggg

SEQ ID NO: 117 - protein, 17 aa, Homo sapiens
IVDGAVFALLKAVFVLG

SEQ ID NO: 118 - DNA, 51 bp, Homo sapiens
atcgtggatggagccgtgtttgctcttctcaaggctgtgtttgtacttggg

SEQ ID NO: 119 - protein, 17 aa, Homo sapiens
THTANERRWRGEMRDLF

SEQ ID NO: 120 - DNA, 51 bp, Homo sapiens
acacacactgccaatgagcggcggtggcgtggtgaaatgagggatctcttt

SEQ ID NO: 121 - protein, 17 aa, Homo sapiens
GRFSKVSSRAPMEGGEE

SEQ ID NO: 122 - DNA, 51 bp, Homo sapiens
gggaggttcagcaaggtgtctagtcgagctcccatggagggtggggaagaa

SEQ ID NO: 123 - protein, 17 aa, Homo sapiens
GKTEDLGCRYKLFSRVP

SEQ ID NO: 124 - DNA, 51 bp, Homo sapiens
ggaaagacagaagaccttggttgcaggtacaagttatttagtcgtgtgcca

SEQ ID NO: 125 - protein, 12 aa, Homo sapiens
MNHHQQQQQQKA

SEQ ID NO: 126 - DNA, 36 bp, Homo sapiens
atgaaccaccaccagcagcagcagcagcagaaagcg

SEQ ID NO: 127 - protein, 17 aa, Homo sapiens
HGLVDEQQEVRTISALA

SEQ ID NO: 128 - DNA, 51 bp, Homo sapiens
catggtcttgtggatgagcagcaggaagttcggaccatcagtgctttggcc

SEQ ID NO: 129 - protein, 17 aa, Homo sapiens
VCRHGDRCFRLHNKPTF

SEQ ID NO: 130 - DNA, 51 bp, Homo sapiens
gcatgtcgtcatggagacaggtgctttcggttgcacaataaaccgacgttt

SEQ ID NO: 131 - protein, 17 aa, Homo sapiens
SCTTPQCKCLLAKCCVD

SEQ ID NO: 132 - DNA, 51 bp, Homo sapiens
agttgtactacaccgcaatgcaaatgcctgcttgcaaaatgttgtgttgat

SEQ ID NO: 133 - protein, 17 aa, Homo sapiens
SILSKQVQHKPKTGRSL

SEQ ID NO: 134 - DNA, 51 bp, Homo sapiens
tccatattatctaaacaggttcaacataaaccaaaaactggtcgaagttta

SEQ ID NO: 135 - protein, 17 aa, Homo sapiens
QRIGSGSFATVYKGKWH

SEQ ID NO: 136 - DNA, 51 bp, Homo sapiens
caaagaattggatctggatcatttgcaacagtctacaagggaaagtggcat

SEQ ID NO: 137 - protein, 17 aa, Homo sapiens
GDFGLATVESRWSGSHQ

SEQ ID NO: 138 - DNA, 51 bp, Homo sapiens
ggtgattttggtctagctacagtggaatctcgatggagtgggtcccatcag

SEQ ID NO: 139 - protein, 17 aa, Homo sapiens
QANLRHLCCICGNSFRA

SEQ ID NO: 140 - DNA, 51 bp, Homo sapiens
caagccaaccttcgacatctctgctgcatctgtgggaattcttttagagct

SEQ ID NO: 141 - protein, 17 aa, Homo sapiens
QANLRHLCHICGNSFRA

SEQ ID NO: 142 - DNA, 51 bp, Homo sapiens
caagccaaccttcgacatctctgccacatctgtgggaattcttttagagct

SEQ ID NO: 143 - protein, 17 aa, Homo sapiens
DRCLKKVSKGVEQFEDI

SEQ ID NO: 144 - DNA, 51 bp, Homo sapiens
gatcgctgcctcaagaaggtgtccaagggcgtggagcagtttgaagatatt

SEQ ID NO: 145 - protein, 17 aa, Homo sapiens
IKTWVASNKIKDKRQLI

SEQ ID NO: 146 - DNA, 51 bp, Homo sapiens
atcaagacatgggtagcgtccaacaagatcaaggacaagaggcagcttata

SEQ ID NO: 147 - protein, 17 aa, Homo sapiens
QKFDEALRKSWTTKVNW

SEQ ID NO: 148 - DNA, 51 bp, Homo sapiens
caaaaatttgatgaggcgctcaggaaaagctggactactaaagtgaactgg

SEQ ID NO: 149 - protein, 17 aa, Homo sapiens
WVKPIIIGCHAYGDQYR

SEQ ID NO: 150 - DNA, 51 bp, Homo sapiens
tgggtaaaacctatcatcataggttgtcatgcttatggggatcaatacaga

SEQ ID NO: 151 - protein, 17 aa, Homo sapiens
WVKPIIIGGHAYGDQYR

SEQ ID NO: 152 - DNA, 51 bp, Homo sapiens
tgggtaaaacctatcatcataggtggtcatgcttatggggatcaatacaga

SEQ ID NO: 153 - protein, 17 aa, Homo sapiens
WVKPIIIGHHAYGDQYR

SEQ ID NO: 154 - DNA, 51 bp, Homo sapiens
tgggtaaaacctatcatcataggtcatcatgcttatggggatcaatacaga

SEQ ID NO: 155 - protein, 17 aa, Homo sapiens
YKLVVVGADGVGKSALT

SEQ ID NO: 156 - DNA, 51 bp, Homo sapiens
tataagctggtggtggtgggcgccgacggtgtgggcaagagtgcgctgacc

SEQ ID NO: 157 - protein, 17 aa, Homo sapiens
YKLVVVGARGVGKSALT

SEQ ID NO: 158 - DNA, 51 bp, Homo sapiens
tataagctggtggtggtgggcgcccgcggtgtgggcaagagtgcgctgacc

SEQ ID NO: 159 - protein, 17 aa, Homo sapiens
LDILDTAGKEEYSAMRD

SEQ ID NO: 160 - DNA, 51 bp, Homo sapiens
ttggacatcctggataccgccggaaaggaggagtacagcgccatgcgggac

SEQ ID NO: 161 - protein, 17 aa, Homo sapiens
LDILDTAGLEEYSAMRD

SEQ ID NO: 162 - DNA, 51 bp, Homo sapiens
ttggacatcctggataccgccggcctggaggagtacagcgccatgcgggac

SEQ ID NO: 163 - protein, 17 aa, Homo sapiens
LDILDTAGREEYSAMRD

SEQ ID NO: 164 - DNA, 51 bp, Homo sapiens
ttggacatcctggataccgccggccgggaggagtacagcgccatgcgggac

SEQ ID NO: 165 - protein, 17 aa, Homo sapiens
EGWLHKRGKYIKTWRPR

SEQ ID NO: 166 - DNA, 51 bp, Homo sapiens
gagggttggctgcacaaacgagggaagtacatcaagacctggcggccacgc

SEQ ID NO: 167 - protein, 17 aa, Homo sapiens
IARELHQFAFDLLIKSH

SEQ ID NO: 168 - DNA, 51 bp, Homo sapiens
attgcgagagagctgcatcagttcgcttttgacctgctaatcaagtcacac

SEQ ID NO: 169 - protein, 17 aa, Homo sapiens
IARELHQFGFDLLIKSH

SEQ ID NO: 170 - DNA, 51 bp, Homo sapiens
attgcgagagagctgcatcagttcggttttgacctgctaatcaagtcacac

SEQ ID NO: 171 - protein, 17 aa, Homo sapiens
QPDSFAALHSSLNELGE

SEQ ID NO: 172 - DNA, 51 bp, Homo sapiens
cagcccgactcctttgcagccttgcactctagcctcaatgaactgggagag

SEQ ID NO: 173 - protein, 17 aa, Homo sapiens
QMAVIQYSLMGLMVFAM

SEQ ID NO: 174 - DNA, 51 bp, Homo sapiens
cagatggctgtcattcagtactccttgatggggctcatggtgtttgccatg

SEQ ID NO: 175 - protein, 17 aa, Homo sapiens
QMAVIQYSFMGLMVFAM

SEQ ID NO: 176 - DNA, 51 bp, Homo sapiens
cagatggctgtcattcagtactcctttatggggctcatggtgtttgccatg

SEQ ID NO: 177 - protein, 68 aa, Homo sapiens
QNLQNGGGSRSSATLPGRRRRRWLRRRRQPISVAPAGPPRRPNQKPNPPGGARCVIMRPTWPGTSAFT

SEQ ID NO: 178 - DNA, 204 bp, Homo sapiens
cagaacctgcagaatggaggggggagcaggtcttcagccacactgccggggcggcggcggcggcggtggctgcggcggcggcggcagccaatatcagtagctcctgcggggccccctcgccgaccaaaccaaaaaccaaacccacctggcggtgcgaggtgtgtgattatgagaccaacgtggccaggaacctccgcattcaca

SEQ ID NO: 179 - protein, 33 aa, Homo sapiens
QNLQNGGGGAGLQPHCRGGGGGGGCGGGGSQYQ

SEQ ID NO: 180 - DNA, 102 bp, Homo sapiens
cagaacctgcagaatggaggggggggagcaggtcttcagccacactgccggggcggcggcggcggcggtggctgcggcggcggcggcagccaatatcagtag

SEQ ID NO: 181 - protein, 10 aa, Homo sapiens
NQEKEAEKNY

SEQ ID NO: 182 - DNA, 33 bp, Homo sapiens
aaccaagagaaagaggcagaaaaaaactattga

SEQ ID NO: 183 - protein, 40 aa, Homo sapiens
DAAVSPRGLQHRQGRGNLGWWQSPLRKVRVPKRRMVYHPS

SEQ ID NO: 184 - DNA, 123 bp, Homo sapiens
gatgctgctgtcagtcccagggggctgcagcacaggcaggggagagggaatctggggtggtggcagtctcccctgagaaaagtgagagtccccaaaaggaggatggtttatcatcccagttga

SEQ ID NO: 185 - protein, 33 aa, Homo sapiens
FVVSVVKKNRTCPFRLFVRRMLQFTGNKVLDRP

SEQ ID NO: 186 - DNA, 102 bp, Homo sapiens
tttgtcgtttctgttgtgaaaaaaaacaggacttgcccctttcgtctatttgtcagacgaatgttacaatttactggcaataaagttttggatagaccttaa

SEQ ID NO: 187 - protein, 9 aa, Homo sapiens
RSRRSAIKR

SEQ ID NO: 188 - DNA, 32 bp, Homo sapiens
agaagcagaagatcggctataaaaagataatg

SEQ ID NO: 189 - protein, 24 aa, Homo sapiens
SIIVQERERAERRVRRGQVMEIVD

SEQ ID NO: 190 - DNA, 75 bp, Homo sapiens
agtataattgtacaagagagagagagagcagagagaagggtcagaagaggccaagtgatggaaatagtggattaa

SEQ ID NO: 191 - protein, 34 aa, Homo sapiens
NNLVTEKKHRNVQCHDAVEENGQSSFITSPILHS

SEQ ID NO: 192 - DNA, 107 bp, Homo sapiens
aataacttggtcacagaaaaaaaacacagaaatgtgcaatgtcatgatgcagttgaggaaaatggccaatcatcctttattacatcgccaatattacacagctgaaa

SEQ ID NO: 193 - protein, 48 aa, Homo sapiens
HPQRKRRGVPPSPPLALGPRMQLCTQLARFFPITPPVWHILGPQRHTP

SEQ ID NO: 194 - DNA, 149 bp, Homo sapiens
cacccacagaggaaaaggcggggggtccctccgagcccacccctggctctcggccccaggatgcaactgtgcacccagcttgccagatttttccccattacacccccagtgtggcatatccttggtccccagaggcacaccccttgatc

SEQ ID NO: 195 - protein, 31 aa, Homo sapiens
ASRHHLWGATAGTPAPPPVPTCSPRTLRCLP

SEQ ID NO: 196 - DNA, 98 bp, Homo sapiens
gccagccggcaccatctgtggggggcaacagcgggcacccccgcaccaccccccgtgcccacctgttcacccaggaccctgcgatgcctcccctgacc

SEQ ID NO: 197 - protein, 13 aa, Homo sapiens
GPGEAGGPSPQGG

SEQ ID NO: 198 - DNA, 44 bp, Homo sapiens
gggcctggggaggctgggggcccctcaccccaaggcgggtgagc

SEQ ID NO: 199 - protein, 19 aa, Homo sapiens
GGGPSGSGEAPTSPSALRT

SEQ ID NO: 200 - DNA, 62 bp, Homo sapiens
ggcggggggcccagcggctcaggggaggctcccacttctccttcagccctgaggacatgaaa

SEQ ID NO: 201 - protein, 23 aa, Homo sapiens
GNPDVPPPVLFKADQSESSLSSG

SEQ ID NO: 202 - DNA, 72 bp, Homo sapiens
ggaaatccagatgtcccaccccccgtcctcttcaaggcagatcagagcgagagttctttgtcaagtgggtag

SEQ ID NO: 203 - protein, 10 aa, Homo sapiens
AFCYCGEKVP

SEQ ID NO: 204 - DNA, 35 bp, Homo sapiens
gctttttgttactgtggggaaaaagttccttagga

SEQ ID NO: 205 - protein, 16 aa, Homo sapiens
TLHPDSGNGCYLRRQK

SEQ ID NO: 206 - DNA, 50 bp, Homo sapiens
acgctgcacccggactccggcaacggctgctacttgcgccgccagaagcg

SEQ ID NO: 207 - protein, 16 aa, Homo sapiens
LHPDSGNMYGCYLRRQ

SEQ ID NO: 208 - DNA, 53 bp, Homo sapiens
acgctgcacccggactccggcaacatgtacggctgctacttgcgccgccagaa

SEQ ID NO: 209 - protein, 17 aa, Homo sapiens
LHPDSGNMCCYLRRQKR

SEQ ID NO: 210 - DNA, 51 bp, Homo sapiens
ctgcacccggactccggcaacatgtgctgctacttgcgccgccagaagcgc

SEQ ID NO: 211 - protein, 16 aa, Homo sapiens
CGASACDVSLIAMDSA

SEQ ID NO: 212 - DNA, 48 bp, Homo sapiens
tgcggggcctctgcctgtgatgtctccctcattgctatggacagtgct

SEQ ID NO: 213 - protein, 16 aa, Homo sapiens
TEYNQKLQVNQFSESK

SEQ ID NO: 214 - DNA, 48 bp, Homo sapiens
accgaatacaaccagaaattacaagtgaatcaatttagtgaatccaaa

SEQ ID NO: 215 - protein, 24 aa, Homo sapiens
TEISCCTLSSEENEYLPRPEWQLQ

SEQ ID NO: 216 - DNA, 72 bp, Homo sapiens
acagaaatttcatgttgcaccctgagcagtgaggagaatgaataccttccaagaccagagtggcagctccag

SEQ ID NO: 217 - protein, 16 aa, Homo sapiens
GLVSFGEHFCLPCALC

SEQ ID NO: 218 - DNA, 50 bp, Homo sapiens
gggctggtgtccttcggggagcacttttgtctgccctgcgccctctgcca

SEQ ID NO: 219 - protein, 16 aa, Homo sapiens
NSKMALNSEALSVVSE

SEQ ID NO: 220 - DNA, 48 bp, Homo sapiens
aacagcaagatggctttgaactcagaagccttatcagttgtgagtgag

SEQ ID NO: 221 - protein, 14 aa, Homo sapiens
CEERGAAGSLISCE

SEQ ID NO: 222 - DNA, 42 bp, Homo sapiens
tgtgaggagcgcggcgcggcaggaagccttatcagttgtgag

SEQ ID NO: 223 - protein, 69 aa, Homo sapiens
LWFQSSELSPTGAPWPSRRPTWRGTTVSPRTATSSARTCCGTKWPSSQEAALGLGSGLLRFSCGTAAIR

SEQ ID NO: 224 - DNA, 207 bp, Homo sapiens
ctgtggttccagagcagtgagctgtccccgacgggagcgccatggcccagccgccgcccgacgtggagggggacgactgtctccccgcgtaccgccacctcttctgcccggacctgctgcgggacaaagtggccttcatcacaggaggcggctctgggattgggttccggattgctgagattttcatgcggcacggctgccatacgg

SEQ ID NO: 225 - protein, 70 aa, Homo sapiens
WGMELAASRRFSWDHHSAGGPPRVPSVRSGAAQVQPKDPLPLRTLAGCLARTAHLRPGAESLPQPQLHCT

SEQ ID NO: 226 - DNA, 210 bp, Homo sapiens
tgggggatggagttggcagcgtctcggaggttctcctgggaccaccactccgccggggggccgcccagagtgccaagcgtccgatccggcgccgcccaagtgcagcccaaggacccgctcccgctccgcaccctggcaggctgcctagccaggactgcgcacctgcgccctggggcggagtccttaccccaaccccagcttcactgcaca

SEQ ID NO: 227 - protein, 28 aa, Homo sapiens
KEQILAVASLVSSQSIHPSWGQSPLSRI

SEQ ID NO: 228 - DNA, 84 bp, Homo sapiens
aaggaacagattttagctgtggccagtctcgtttcctctcagtccatccacccttcatggggccagagccctctctccagaatc

SEQ ID NO: 229 - protein, 14 aa, Homo sapiens
LELELSEGVCFRLR

SEQ ID NO: 230 - DNA, 42 bp, Homo sapiens
ctggagctggagctgtcggaaggagtctgcttcagattaaga

SEQ ID NO: 231 - protein, 17 aa, Homo sapiens
QQLRIFCAAMASNEDFS

SEQ ID NO: 232 - DNA, 52 bp, Homo sapiens
cagcagctaaggatattttgtgcagccatggcctccaacgaagatttctcca

SEQ ID NO: 233 - protein, 31 aa, Homo sapiens
DGFSGSLFAVVTRRCYFLKWRTIFPQSLMWL

SEQ ID NO: 234 - DNA, 93 bp, Homo sapiens
gacgggtttagcggcagcctcttcgcagttgtcaccagacgctgttacttcctaaaatggcggacaatcttcccacagagtttgatgtggtta

SEQ ID NO: 235 - protein, 16 aa, Homo sapiens
KMHFSLKEHPPPPCPP

SEQ ID NO: 236 - DNA, 48 bp, Homo sapiens
aaaatgcacttctccctcaaggagcacccaccgcccccttgcccgcct

SEQ ID NO: 237 - protein, 31 aa, Homo sapiens
DLRRVATYCAPLPSSWRPGTGTTIPPRMRSC

SEQ ID NO: 238 - DNA, 93 bp, Homo sapiens
gatctgcgccgggtcgccacatactgcgctcctttaccctcatcgtggaggcctgggactgggacaacgataccaccccgaatgaggagctgc

SEQ ID NO: 239 - protein, 48 aa, Homo sapiens
LQERMELLACGAERGAGGWGGGGGGGGGDRRGGGGSAPALADFAGGRG

SEQ ID NO: 240 - DNA, 144 bp, Homo sapiens
ttgcaggagcggatggagttgcttgcctgcggagccgagcgcggggccggcggctgggggggaggcggtggcggcggcggcggcgaccgaagaggaggaggaggaagcgcgccagctcttgcagactttgcaggcggccgaggg

SEQ ID NO: 241 - protein, 47 aa, Homo sapiens
LTFLDFIQVTLRVMSGSQMENGSSYFFKPFSWGLGVGLSAWLCVMLT

SEQ ID NO: 242 - DNA, 141 bp, Homo sapiens
ctgacgtttttagatttcatccaggtaacgttgagagtaatgtcaggatctcaaatggaaaacggaagttcctattttttcaagcccttttcatggggtctgggggtgggactctcggcctggctgtgtgtaatgttaact

SEQ ID NO: 243 - protein, 51 aa, Homo sapiens
FMIGELVGELCCQLTFRLPFLESLCQAVVTQALRFNPSFQEVCIYQDTDLM

SEQ ID NO: 244 - DNA, 153 bp, Homo sapiens
ttcatgattggagaacttgtaggtgagttgtgttgccaactcactttccgtttacctttcctcgagagtctttgtcaagctgtagttacacaggctttgaggtttaacccatcttttcaggaagtttgtatttatcaagacactgatctcatg

SEQ ID NO: 245 - protein, 16 aa, Homo sapiens
VAMMVPDRQVHYDFGL

SEQ ID NO: 246 - DNA, 48 bp, Homo sapiens
gttgctatgatggttcctgatagacaggttcattatgactttggattg

SEQ ID NO: 247 - protein, 24 aa, Homo sapiens
WCPLDLRLGSTGCLTCRHHQTSHE

SEQ ID NO: 248 - DNA, 72 bp, Homo sapiens
tggtgtccgctggatcttagactcggttccactggatgtctcacatgcagacatcatcaaacgtcacatgag

SEQ ID NO: 249 - protein, 25 aa, Homo sapiens
VVGRRHETAPQPLLVPDRAGGEGGA

SEQ ID NO: 250 - DNA, 75 bp, Homo sapiens
gtcgtgggaaggcgtcatgaaacagctcctcaacccctgctggtgcccgaccgagctggtggtgaagggggagca

SEQ ID NO: 251 - protein, 17 aa, Homo sapiens
DYWAQKEKISIPRTHLC

SEQ ID NO: 252 - DNA, 51 bp, Homo sapiens
gactactgggctcaaaaggagaagatcagcatccccagaacacacctgtgt

SEQ ID NO: 253 - protein, 18 aa, Homo sapiens
DYWAQKEKGSSSFLRPSC

SEQ ID NO: 254 - DNA, 54 bp, Homo sapiens
gactactgggctcaaaaggagaagggatcatcttcattcctgcgaccatcctgt

SEQ ID NO: 255 - protein, 14 aa, Homo sapiens
LVLGVLSGHSGSRL

SEQ ID NO: 256 - DNA, 42 bp, Homo sapiens
cttgtacttggtgtattgagcgggcacagtggctcacgccta

SEQ ID NO: 257 - protein, 25 aa, Homo sapiens
PVPTATPGVRSVTSPQGLGLFLKFI

SEQ ID NO: 258 - DNA, 75 bp, Homo sapiens
cctgtcccaactgctacacctggggtaagatcagtgactagtccccaggggctgggccttttccttaagtttatt

SEQ ID NO: 259 - protein, 28 aa, Homo sapiens
KENDVREVCDVYLQMQIFFHFKFRSYFH

SEQ ID NO: 260 - DNA, 84 bp, Homo sapiens
aaggaaaatgatgtccgtgaggtctgtgatgtgtatttacaaatgcagatcttcttccattttaagttcagaagttactttcat

SEQ ID NO: 261 - protein, 90 aa, Homo sapiens
VPFRELKNQRTAQGAPGIHHAASPVAANLCDPARHAQHTRIPCGAGQVRAGRGPEAGGGVLQPQRPAPEKPGCPCRRGQPRLHTVKMWRA

SEQ ID NO: 262 - DNA, 270 bp, Homo sapiens
gtgcccttccgggagctcaagaaccagagaacagcacaaggggctcctgggatccaccacgcggcttcccccgttgctgccaacctctgcgacccggcgagacacgcacagcacacacgcatcccctgcggcgctggccaagtgcgtgctggccgaggtcccgaagcaggtggtggagtactacagccacagaggcctgcccccgagaagcctgggtgtccctgccggagaggccagcccaggctgcacaccgtgaagatgtggagggcg

SEQ ID NO: 263 - protein, 22 aa, Homo sapiens
FARKMLEKVHRQHLQLSHNSQE

SEQ ID NO: 264 - DNA, 66 bp, Homo sapiens
tttgctagaaaaatgctggagaaggtacacagacaacacctacagctttcccacaatagccaggaa

SEQ ID NO: 265 - protein, 11 aa, Homo sapiens
KRSFAVTERII

SEQ ID NO: 266 - DNA, 33 bp, Homo sapiens
aagagaagttttgctgtcacggagaggatcatc

SEQ ID NO: 267 - protein, 17 aa, Homo sapiens
MFLRKEQQVGPHSFSML

SEQ ID NO: 268 - DNA, 51 bp, Homo sapiens
atgttccttagaaaggagcagcaggtgggtccccacagcttttctatgctt

SEQ ID NO: 269 - protein, 14 aa, Homo sapiens
VLRFLDLKVRYLHS

SEQ ID NO: 270 - DNA, 42 bp, Homo sapiens
gtgctgcgctttctggacttaaaggtgagatacctgcactct

SEQ ID NO: 271 - protein, 32 aa, Homo sapiens
GNTTLQQLGEASQAPSGSLIPLRLPLLWEVRG

SEQ ID NO: 272 - DNA, 96 bp, Homo sapiens
ggcaacaccaccctccagcagctgggtgaggcctcccaggcgccctcaggctccctcatccctctgaggctgcctctgctctgggaagtgaggggc

SEQ ID NO: 273 - protein, 25 aa, Homo sapiens
GLNLNTDRPGGYSYSIWWKNNAKNR

SEQ ID NO: 274 - DNA, 75 bp, Homo sapiens
ggactgaacttaaatactgatagaccaggtggttacagctattcaatttggtggaaaaacaatgccaagaacaga

SEQ ID NO: 275 - protein, 27 aa, Homo sapiens
WKFEMSYTVGGPPPHVHARPRHWKTDR

SEQ ID NO: 276 - DNA, 81 bp, Homo sapiens
tggaaattcgagatgagctacacggtgggtggcccgcctccccatgttcatgctagacccaggcattggaaaactgataga

SEQ ID NO: 277 - protein, 22 aa, Homo sapiens
QWQHYHRSGEAAGTPLWRPTRN

SEQ ID NO: 278 - DNA, 66 bp, Homo sapiens
cagtggcagcactaccaccggtcaggtgaggccgcagggactcccctctggagacccacaagaaac

SEQ ID NO: 279 - protein, 29 aa, Homo sapiens
KVLNEIDAVVTVPPSLSTSQIPQGCCIIL

SEQ ID NO: 280 - DNA, 87 bp, Homo sapiens
aaggtcctcaacgagatcgatgcggtagttaccgtccctccctccctgtctacctcccagataccgcagggctgctgcatcatattg

SEQ ID NO: 281 - protein, 18 aa, Homo sapiens
ANLKGTLQVRSGQAVSPR

SEQ ID NO: 282 - DNA, 54 bp, Homo sapiens
gccaatctgaaaggcaccctgcaggtgaggagtgggcaggcagtgagtccacgc

SEQ ID NO: 283 - protein, 70 aa, Homo sapiens
LQAAASGQGKQGVPCPWGCCAYAESPRALISGDAPSQVEREVPGPCLNTHSLSHRSPQLPGLPHPKQPSV

SEQ ID NO: 284 - DNA, 210 bp, Homo sapiens
ctccaggcggctgcctcgggccaaggcaagcagggcgtcccttgtccctggggttgctgtgcctacgctgagagtccccgggccctgatttcgggagatgctccatcacaggtggagcgggaggtgccgggcccctgcctcaacacgcattctctctcccacagatccccacagctcccaggccttccacaccccaagcagccttctgtt

SEQ ID NO: 285 - protein, 9 aa, Homo sapiens
KIQNKNCPD

SEQ ID NO: 286 - DNA, 27 bp, Homo sapiens
aaaattcagaataaaaattgtccagac

SEQ ID NO: 287 - protein, 37 aa, Homo sapiens
GEVELSEGGEGQRHLAFPWACSGPGWRGVCCAAVEPA

SEQ ID NO: 288 - DNA, 111 bp, Homo sapiens
ggcgaggtggagctctcagagggcggtgagggccagcggcaccttgcatttccctgggcctgctctgggccgggctggagaggggtgtgctgtgctgctgtggagcctgct

SEQ ID NO: 289 - protein, 9 aa, Homo sapiens
IEMKKLLKS

SEQ ID NO: 290 - DNA, 27 bp, Homo sapiens
attgaaatgaaaaaactgttaaaaagt

SEQ ID NO: 291 - protein, 70 aa, Homo sapiens
KMRAIQAEGGHGQACCGGAWGWAPGDGGPQGMLTHTLPTLGFQSAWTWRREDADRAWRTPKACASRRWSI

SEQ ID NO: 292 - DNA, 210 bp, Homo sapiens
aagatgcgggccatccaggccgagggtgggcacgggcaggcctgctgtggaggggcctggggatgggcaccgggggacgggggcccccaggggatgctcacgcatactctgcccaccctgggcttccagagcgcctggacatggagaagagaagatgcagacagagcctggaggactccgaaagcctgcgcatcaaggaggtggagcata

SEQ ID NO: 293 - protein, 74 aa, Homo sapiens
LLEPFRRGEPGPRGLLSGSSRGGEGPGRSIEAAPATPLPCCRKNPCRPQPSRFLPPRVLLVIILPKLDCPKLGF

SEQ ID NO: 294 - DNA, 222 bp, Homo sapiens
ctgctggagcccttccgccgcggtgagcccgggccccgcgggctgctctcgggaagttcccgcggaggggaggggcctggccgttcgatcgaggctgcacccgccacacctttgccctgttgccgcaagaacccttgtcggccccagccttccagatttttgcctcctagggtattgttagtgatcattcttcccaaactggattgtccaaaacttgggttc

SEQ ID NO: 295 - protein, 65 aa, Homo sapiens
PSGRRTKRLVTLRSGCAIQCWHPRAGPVPSALPHTERPPRLVRGAADPRTVTLGRSPAVMPRAPA

SEQ ID NO: 296 - DNA, 195 bp, Homo sapiens
ccctcggggcggagaaccaaacggttagttaccctgcgttctggctgcgccatacaatgctggcatcctcgtgccggcccagttccctcagcgcttcctcacacagagaggcccccaaggcttgtcaggggagcagcagatcccaggacagtgaccctgggacggagccctgcagtcatgcctcgggcccctgcg

SEQ ID NO: 297 - protein, 95 aa, Homo sapiens
CHLFLQPQVGTPPPHTASARAPSGPPHPHESCPAGRRPARAAQTCARRQHGLPGCEEAGTARVPSLHLHLHQAALGAGRGRGWGEACAQVPPSRG

SEQ ID NO: 298 - DNA, 285 bp, Homo sapiens
tgccacctcttcctgcagccccaggttggcaccccccccccccacactgccagtgctcgagcccccagtggtccaccccaccctcatgaaagttgccctgcagggcgaagacctgcgagagctgcgcagacatgtgcacgccgacagcacggacttcctggctgtgaagaggctggtacagcgcgtgttcccagcctgcacctgcacctgcaccaggccgccctcggagcaggaaggggccgtgggtggggagaggcctgtgcccaagtacccccctcaagaggc

SEQ ID NO: 299 - protein, 45 aa, Homo sapiens
KELKLEQQVGGQGLRGVGQGVRGGFVTLTTHTPFPSQEAAERESK

SEQ ID NO: 300 - DNA, 135 bp, Homo sapiens
aaggagctcaagctggagcagcaggtgggtgggcagggcttgagaggggtgggccaaggggtgcgtggcggcttcgtgaccctcactacccataccccgttcccctcccaggaagctgcagagcgggagtctaaa

SEQ ID NO: 301 - protein, 175 aa, Homo sapiens
GEISQEEVPPSRHLGVSWGAGVWAGLTLGASAPPNSSFPSGAELQPVVCCIRSDTRQPRPPDFPQHRGDPRLPQLSLGAENQTVSYPAFWLRHTMLASSCRPSSLSASSHREAPKACQGSSRSQDSDPGTEPCSHASGPCVTSTVSSPGLLPQRLLPLALTGLPVEEDGFEHAGA

SEQ ID NO: 302 - DNA, 525 bp, Homo sapiens
ggagaaatcagccaggaagaggtgcctccctcccgccacctgggcgtctcatggggtgctggggtgtgggcgggcctcaccctcggggcctctgcaccccctaactctagcttcccctcaggtgctgagctacagccagttgtgtgctgcattaggagtgacacaagacagccccgaccccccgactttcctcagcacaggggagatccacgccttcctcagctctccctcggggcggagaaccaaacggttagttaccctgcgttctggctgcgccatacaatgctggcatcctcgtgccggcccagttccctcagcgcttcctcacacagagaggcccccaaggcttgtcaggggagcagcagatcccaggacagtgaccctgggacggagccctgcagtcatgcctcgggcccctgcgtaacctccactgtctccagcccaggtctccttcctcagaggctattgcctctcgctctgactgggctccctgtggaggaagatggtttcgagcacgcgggagcc

SEQ ID NO: 303 - protein, 56 aa, Homo sapiens
DCMLSEEGGQARRGGSLCSLAAHTIASAARGRFLSRLSNFCAVVKASRGAPSCTWE

SEQ ID NO: 304 - DNA, 168 bp, Homo sapiens
gactgcatgctcagcgaggaaggtgggcaggcgcggcggggtggatccctctgctccttagctgcccacaccattgcctcggcagcccgaggtcgcttcctctccaggctctccaatttctgtgccgtagttaaagcgagcaggggcgccccttcctgcacctgggag

SEQ ID NO: 305 - protein, 43 aa, Homo sapiens
EAFQRAAGEGGPGRGGARRGARVLQSPFCRAGAGEWLGHQSLR

SEQ ID NO: 306 - DNA, 129 bp, Homo sapiens
gaggccttccagagggccgctggtgagggcggcccgggccgcggtggggcacggcgcggtgccagggtgttgcagagccccttttgcagggcaggagctggggagtggttaggacatcagtccctcagg

SEQ ID NO: 307 - protein, 35 aa, Homo sapiens
PEPRRLSPGEPRGRPRKGWGIWGLCGARVGPKAWR

SEQ ID NO: 308 - DNA, 105 bp, Homo sapiens
cctgagcccaggagactgagcccaggtgagcccagggggcgaccccggaagggctgggggatctggggtttgtgtggagcgcgggtggggcccaaggcttggcgg

SEQ ID NO: 309 - protein, 61 aa, Homo sapiens
VPFRELKNVSVLEGLRQGRLGGPCSCHCPRPSQARLTPVDVAGPFLCLGDPGLFPPVKSSI

SEQ ID NO: 310 - DNA, 183 bp, Homo sapiens
gtgcccttccgggagctcaagaacgtgagtgtcctggaggggctccgtcaaggccggcttgggggtccctgttcatgtcactgcccaagaccttcccaggccaggctcacgccagtggatgtggcaggtcccttcttgtgtctgggggatcctgggctgttccccccagtcaagagcagtatc

SEQ ID NO: 311 - protein, 98 aa, Homo sapiens
FVSLTAIQMASSATPWGRWPVATPTAACPRRRPSSLPTGGDSASKKPISRRAPWQPWACPGRSVNSAAPRAWCPPATTPRTQSPSRDLRPRCLSSWSS

SEQ ID NO: 312 - DNA, 294 bp, Homo sapiens
tttgtgagcctgactgccatccagatggcatcgtcggccactccctgggggaggtggcctgtggctacgccgacggctgcctgtcccaggaggaggccgtcctcgctgcctactggaggggacagtgcatcaaagaagcccatctcccgccgggcgccatggcagccgtgggcttgtcctgggaggagtgtaaacagcgctgccccccgggcgtggtgcccgcctgccacaactccaaggacacagtcaccatctcgggacctcaggccccggtgtttgagttcgtggagcagc

SEQ ID NO: 313 - protein, 109 aa, Homo sapiens
PVAIKPGTGPPNNSSIHGGSKRSENSYCRDLRGQLRAICCSSYSHDRHTTEERGSRGRHVWRIRRLHTSGLPCCCHSGPHPRRLPDILRLVTSTKTDHTNTTEGTLDYL

SEQ ID NO: 314 - DNA, 327 bp, Homo sapiens
ccagttgccattaaacctggtacagggccgcccaataactccagtatacacggtggctccaaacgttcagagaattcctactgccgggatctacggggccagttacgtgccatttgctgctccagctacagccacgatcgccacactacagaagaacgcggcagccgcggccgccatgtatggaggatacgcaggctacatacctcaggccttccctgctgctgccattcaggtccccatccccgacgtctaccagacatactgaggctggtgaccagcacgaagacagaccacacaaacaccactgaaggaacgcttgactattta

SEQ ID NO: 315 - protein, 40 aa, Homo sapiens
KWNKNWTATLGALTIRGHKLLCHLPHLLSSVQQTCRSSSR

SEQ ID NO: 316 - DNA, 120 bp, Homo sapiens
aagtggaacaagaactggacagccacactcggggctcttacaatcaggggtcataagctgctatgtcacctacctcaccttctcagctctgtccagcaaacctgcagaagtagttctaga

SEQ ID NO: 317 - protein, 50 aa, Homo sapiens
FKKFDGPCGERGGGRTARALWARGDSVLTPALDPQTPVRAPSLTRAAAAV

SEQ ID NO: 318 - DNA, 150 bp, Homo sapiens
ttcaagaagttcgacggcccttgtggtgagcgcggcggcgggcgcacggctcgagctctgtgggcgcgcggcgacagcgtcctgactcctgccctcgacccccagacccctgtcagggcgccctccctgacccgagccgcagctgccgtg

SEQ ID NO: 319 - protein, 52 aa, Homo sapiens
ENASLVFTGSNSPIPACELSSHPAHGISPWIPSPGNEHFHGIKKQVKAIKVE

SEQ ID NO: 320 - DNA, 156 bp, Homo sapiens
gaaaatgccagcctagtgtttacaggatccaacagccccataccagcctgcgaactgagtagtcacccagctcatggtatcagtccttggataccctcacctggaaatgaacatttccatggcataaagaagcaagtaaaggcaataaaagtagaa

SEQ ID NO: 321 - protein, 55 aa, Homo sapiens
RLTQRLVQGWTPMENRWCGRRAGGQPASSSTRWTTCRAACLLTKWTAGRSQTSIG

SEQ ID NO: 322 - DNA, 165 bp, Homo sapiens
cggctgacgcaacggctggtccagggctggaccccaatggagaacaggtggtgtggcaggcgagcgggtgggcagcccgcatcatccagcacgagatggaccacctgcagggctgcctgtttattgacaaaatggacagcaggacgttcacaaacgtctattgga

SEQ ID NO: 323 - protein, 32 aa, Homo sapiens
ENSGNASRWLHVPSSSDDWLGWKKSSAITSNS

SEQ ID NO: 324 - DNA, 96 bp, Homo sapiens
gaaaattcaggcaacgcctcgcgttggctgcatgtaccaagtagttcagacgattggctcggatggaaaaaatcttctgcaattacttccaattcc

SEQ ID NO: 325 - protein, 59 aa, Homo sapiens
GMECTLGQVGAPSPRREEDGWRGGHSRFKADVPAPQGPCWGGQPGSAPSSAPPEQSLLD

SEQ ID NO: 326 - DNA, 177 bp, Homo sapiens
ggcatggagtgcaccctggggcaggtgggtgccccgtcccctcggagggaggaggacggttggcgtgggggccacagccgattcaaggctgatgtaccagcaccgcagggaccctgctggggtggccaacctggctctgccccctcctcagctcctcctgaacagtcattattagat

SEQ ID NO: 327 - protein, 110 aa, Homo sapiens
KGSVERRSVSLGHPAEGWAWAERSLQPGMTTANTGCLSFHHRGCLLPVLPKLHCGLGGLPLVRAKEIKRVQRAGESSLPVKGLLTVASAVIAVLWGRPSEVTGENEAQHD

SEQ ID NO: 328 - DNA, 330 bp, Homo sapiens
aaagggagtgtggagaggcgctcggtgagcctggggcatcctgctgagggttgggcatgggcagagaggagcctccagccaggcatgaccacagccaacacaggctgcctctcattccaccacagagggtgcctcctccctgttttgcccaaattacactgtgggctaggtggactacctcttgtcagagctaaagaaatcaagcgagtgcagagggcaggggagagttcgctgcctgtgaagggccttctcaccgtcgcttcggctgtcatcgcagtcctgtggggtaggccaagcgaggtcacaggagaaaatgaggctcagcatgat

SEQ ID NO: 329 - protein, 75 aa, Homo sapiens
FGLTTLAGRSSHGTSGLRAATHTKSGDGGQGAARQCEKLLELARATRPWGRSTSASSRWTHRGYMCPPRCAVACW

SEQ ID NO: 330 - DNA, 225 bp, Homo sapiens
tttggcctcaccacacttgcaggtagaagctcccacgggacctcaggactgagggcagccacacacaccaagtctggggacggtggccagggggctgccaggcagtgtgagaagctcctggagctggcccgggctaccagaccctgggggaggagtacgtcagcatcatccaggtggacccatcgcggatacatgtgccctcctcgctgcgccgtggcgtgctgg

SEQ ID NO: 331 - protein, 29 aa, Homo sapiens
IIDSDKIMAVCMGCLLTRHVQCQAMEMQQ

SEQ ID NO: 332 - DNA, 87 bp, Homo sapiens
attattgacagcgacaagataatggcagtgtgcatggggtgcctgctcacacgtcatgtgcaatgccaggccatggagatgcaacag

SEQ ID NO: 333 - protein, 49 aa, Homo sapiens
DGHSYTSKVNCLLLQDGFHGCVSITGAAGRRNLSIFLFLMLCKLEFHAC

SEQ ID NO: 334 - DNA, 147 bp, Homo sapiens
gatggccactcctacacatccaaggtgaattgtttactccttcaagatgggttccatggctgtgtgagcatcaccggggcagctggaagaagaaacctgagcatcttcctgttcttgatgctgtgcaaattggagttccatgcttgt

SEQ ID NO: 335 - protein, 70 aa, Homo sapiens
LLNAEDYRCAIHSKEIYLLSPSPHQAMDKFSLCCINCNLCLHVFLLLLFFQNKDVWLISNIILLWIYGGI

SEQ ID NO: 336 - DNA, 210 bp, Homo sapiens
ctactaaatgcagaagattaccggtgtgccattcattcaaaagagatttatcttctttccccctccccccaccaggcaatggacaagttttctctctgctgcatcaactgcaatctatgtttacatgtattccttttactactattttttcaaaacaaagatgtatggcttatttcaaacatcattttactttggatatatggcggtatt

SEQ ID NO: 337 - protein, 33 aa, Homo sapiens
TGGKSTCSAPGPQSLPSTPFSTYPQWVILITEL

SEQ ID NO: 338 - DNA, 99 bp, Homo sapiens
acagggggcaaaagcacctgctcggctcctggccctcagtctctcccctccactccattctccacctacccacagtgggtcattctgatcaccgaactg

SEQ ID NO: 339 - protein, 28 aa, Homo sapiens
VETLENANSFSSGIQPLLCSLIGLENPT

SEQ ID NO: 340 - DNA, 84 bp, Homo sapiens
gtggagaccctggagaatgccaacagcttctccagcgggatccagccactcctctgttccctgattggcctggagaatcccacc

SEQ ID NO: 341 - protein, 38 aa, Homo sapiens
AGAGTISEGSVLHGQRLECDARRFFGCGTTILAEWEHH

SEQ ID NO: 342 - DNA, 114 bp, Homo sapiens
gctggggctggaacaatttccgaaggtagtgttctccatggtcagaggctggagtgtgatgccagacgtttttttgggtgtgggactacaatactggcagagtgggagcaccat

SEQ ID NO: 343 - protein, 17 aa, Homo sapiens
GVPGDSTRRAVRRMNTF

SEQ ID NO: 344 - DNA, 51 bp, Homo sapiens
ggagttccaggagattcaaccaggagagcagtgaggagaatgaataccttc

SEQ ID NO: 345 - protein, 20 aa, Homo sapiens
HVVGYGHLDTSGSSSSSSWP

SEQ ID NO: 346 - DNA, 60 bp, Homo sapiens
cacgtggtgggctatggccaccttgatacttccgggtcatcctcctcctcctcctggccc

SEQ ID NO: 347 - protein, 64 aa, Homo sapiens
WTPIPVLTRWPLPHPPPWRRATSCRMARSSPSATSGSSVRRRCSSLPSWVWNLAASTRPRSTPS

SEQ ID NO: 348 - DNA, 196 bp, Homo sapiens
tggacgcccatcccggtgctcacgagatggccactaccacatcctcctccctggagaagagctacaagctgccggatggccaggtcatcaccatcagcaacaagcggttccagtgtccggaggcgctgttccagccttccttcctgggtatggaatcttgcggcatccacgagaccacgttcaactccatcatgaa

SEQ ID NO: 349 - protein, 16 aa, Homo sapiens
SLYHREKQLIAMDSAI

SEQ ID NO: 350 - DNA, 48 bp, Homo sapiens
tccctctaccaccgggagaagcagctcattgctatggacagtgctatc

SEQ ID NO: 351 - protein, 43 aa, Homo sapiens
LHPQRETFTPRWSGANYWKLAFPVGAEGTFPAAATQRGVVRPA

SEQ ID NO: 352 - DNA, 131 bp, Homo sapiens
cttcatcctcagagggaaacattcactccccggtggtcgggcgcgaattactggaaattggcttttcccgttggggccgaaggtaccttccctgcggcggcgactcagcggggtgtcgttcggccggcgtg

SEQ ID NO: 353 - protein, 35 aa, Homo sapiens
NSKMALNSLNSIDDAQLTRIAPPRSHCCFWEVNAP

SEQ ID NO: 354 - DNA, 105 bp, Homo sapiens
aacagcaagatggctttgaactcattaaactccattgatgatgcacagttgacaagaattgcccctccaagatctcattgctgtttctgggaagtaaacgctcct

SEQ ID NO: 355 - protein, 50 aa, Homo sapiens
MAGGVLRRLLCREPDRDGDKGASREETVVPLHIGDPVVLPGIGQCYSALF

SEQ ID NO: 356 - DNA, 151 bp, Homo sapiens
atggctggaggagtccttcggcggctgttgtgtcgggagcctgatcgcgatggggacaaaggcgcaagtcgagaggaaactgttgtgcctcttcatattggcgatcctgttgtgctccctggcattgggcagtgttacagtgcactcttct

SEQ ID NO: 357 - protein, 39 aa, Homo sapiens
DDRNTFDIVWWCPMSRLRLALTVPPSTTTTCVTVPAWAA

SEQ ID NO: 358 - DNA, 120 bp, Homo sapiens
gatgacagaaacactttcgacatagtgtggtggtgccctatgagccgcctgaggttggctctgactgtaccaccatccactacaactacatgtgtaacagttcctgcatgggcggcatga

SEQ ID NO: 359 - protein, 17 aa, Homo sapiens
VQPIARELYQFTFDLLI

SEQ ID NO: 360 - DNA, 51 bp, Homo sapiens
gtgcagcctattgcgagagagctgcatcagttcacttttgacctgctaatc

SEQ ID NO: 361 - protein, 17 aa, Homo sapiens
QMAVIQYSCMGLMVFAM

SEQ ID NO: 362 - DNA, 51 bp, Homo sapiens
cagatggctgtcattcagtactcctgcatggggctcatggtgtttgccatg

SEQ ID NO: 363 - protein, 17 aa, Homo sapiens
PKSEVRAKCKFSILNAK

SEQ ID NO: 364 - DNA, 50 bp, Homo sapiens
caaagagtgaagttcgggcaaaattcaaatgctccatcctgaatgccaag

SEQ ID NO: 365 - protein, 17 aa, Homo sapiens
MMAEIISVHVPKILSGK

SEQ ID NO: 366 - DNA, 51 bp, Homo sapiens
atgatggcagagatcatctctgtgcacgtgcccaagatcctttctgggaaa

SEQ ID NO: 367 - protein, 17 aa, Homo sapiens
LHPDSGNMVENGCYLRR

SEQ ID NO: 368 - DNA, 51 bp, Homo sapiens
ctgcacccggactccggcaacatggtcgagaacggctgctacttgcgccgc

SEQ ID NO: 369 - protein, 17 aa, Homo sapiens
CYLRRQKRLKCEKQPGA

SEQ ID NO: 370 - DNA, 51 bp, Homo sapiens
tgctacttgcgccgccagaagcgcttgaagtgcgagaagcagccgggggcc

SEQ ID NO: 371 - protein, 17 aa, Homo sapiens
MFENGCYLGRQKRFKCE

SEQ ID NO: 372 - DNA, 51 bp, Homo sapiens
atgttcgagaacggctgctacttgggccgccagaagcgcttcaagtgcgag

SEQ ID NO: 373 - protein, 16 aa, Homo sapiens
DSSGNLLERNSFEVRV

SEQ ID NO: 374 - DNA, 48 bp, Homo sapiens
gactccagtggtaatctactggaacggaacagctttgaggtgcgtgtt

SEQ ID NO: 375 - protein, 61 aa, Homo sapiens
VFFKRAAEGFFRMNKLKESSDTNPKPYCMAAPMGLTENNRNRKKSYRETNLKAVSWPLNHT

SEQ ID NO: 376 - DNA, 183 bp, Homo sapiens
gtcttcttcaaaagagccgctgaaggatttttcagaatgaacaaattaaaagaatcatcagacactaaccccaagccatactgcatggcagcaccaatgggactgacagaaaacaacagaaataggaagaaatcctacagagaaacaaacttgaaagctgtctcatggcctttgaatcatact

SEQ ID NO: 377 - protein, 15 aa, Homo sapiens
LTFLDFIQVTLRVMS

SEQ ID NO: 378 - protein, 15 aa, Homo sapiens
VTLRVMSGSQMENGS

SEQ ID NO: 379 - protein, 24 aa, Homo sapiens
YEAGMTLGEKFRVGNCKHLKMTRP

SEQ ID NO: 380 - DNA, 72 bp, Homo sapiens
tatgaagcagggatgactctgggagaaaaattccgggttggcaattgcaagcatctcaaaatgaccagaccc

SEQ ID NO: 381 - protein, 28 aa, Homo sapiens
YEAGMTLGGKILFFLFLLLPLSPFSLIF

SEQ ID NO: 382 - DNA, 84 bp, Homo sapiens
tatgaagcagggatgactctgggaggtaagatacttttctttctcttcctcctccttcctctctcccccttctccctcattttc

SEQ ID NO: 383 - protein, 16 aa, Homo sapiens
GYLRMQGLMAQRLLLR

SEQ ID NO: 384 - DNA, 48 bp, Homo sapiens
gggtacctgaggatgcagggactcatggctcagcgacttcttctgagg

SEQ ID NO: 385 - protein, 48 aa, Homo sapiens
DGHSYTSKVNCLLLQDGFHGCVSITGAAGRRNLSIFLFLMLCKLEFHA

SEQ ID NO: 386 - DNA, 144 bp, Homo sapiens
gatggccactcctacacatccaaggtgaattgtttactccttcaagatgggttccatggctgtgtgagcatcaccggggcagctggaagaagaaacctgagcatcttcctgttcttgatgctgtgcaaattggagttccatgct

SEQ ID NO: 387 - protein, 9 aa, Homo sapiens
STRRAVRRM

SEQ ID NO: 388 - protein, 9 aa, Homo sapiens
RAVRRMNTF

SEQ ID NO: 389 - protein, 9 aa, Homo sapiens
IPVLTRWPL

SEQ ID NO: 390 - protein, 9 aa, Homo sapiens
QLIAMDSAI

SEQ ID NO: 391 - protein, 9 aa, Homo sapiens
FPVGAEGTF

SEQ ID NO: 392 - protein, 9 aa, Homo sapiens
NSKMALNSL

SEQ ID NO: 393 - protein, 9 aa, Homo sapiens
GVLRRLLCR

SEQ ID NO: 394 - protein, 9 aa, Homo sapiens
CPMSRLRLA

SEQ ID NO: 395 - protein, 9 aa, Homo sapiens
YQFTFDLLI

SEQ ID NO: 396 - protein, 9 aa, Homo sapiens
IQYSCMGLM

SEQ ID NO: 397 - protein, 9 aa, Homo sapiens
RAKCKFSIL

SEQ ID NO: 398 - protein, 9 aa, Homo sapiens
HVPKILSGK

SEQ ID NO: 399 - protein, 9 aa, Homo sapiens
NMVENGCYL

SEQ ID NO: 400 - protein, 9 aa, Homo sapiens
YLRRQKRLK

SEQ ID NO: 401 - protein, 9 aa, Homo sapiens
CYLGRQKRF

SEQ ID NO: 402 - protein, 9 aa, Homo sapiens
LLERNSFEV

SEQ ID NO: 403 - protein, 9 aa, Homo sapiens
YCMAAPMGL

SEQ ID NO: 404 - protein, 9 aa, Homo sapiens
FFKRAAEGF

SEQ ID NO: 405 - protein, 9 aa, Homo sapiens
RVGNCKHLK

SEQ ID NO: 406 - protein, 9 aa, Homo sapiens
FLFLLLPLS

SEQ ID NO: 407 - protein, 9 aa, Homo sapiens
LMAQRLLLR

SEQ ID NO: 408 - protein, 9 aa, Homo sapiens
IVWWCPMSR

SEQ ID NO: 409 - protein, 9 aa, Homo sapiens
CTELKLSDY

SEQ ID NO: 410 - protein, 9 aa, Homo sapiens
NLVPMVATV

SEQ ID NO: 411 - protein, 9 aa, Homo sapiens
LIYRRRLMK

SEQ ID NO: 412 - protein, 9 aa, Homo sapiens
LYSACFWWL

SEQ ID NO: 413 - protein, 9 aa, Homo sapiens
NPKASLLSL

SEQ ID NO: 414 - protein, 9 aa, Homo sapiens
ELRSRYWAI

SEQ ID NO: 415 - protein, 15 aa, Homo sapiens
SQMENGSSYFFKPFS

SEQ ID NO: 416 - protein, 9 aa, Homo sapiens
IVTDFSVIK

SEQ ID NO: 417 - protein, 15 aa, Homo sapiens
YFFKPFSWGLGVGLS

SEQ ID NO: 418 - protein, 15 aa, Homo sapiens
FMIGELVGELCCQLT

SEQ ID NO: 419 - protein, 15 aa, Homo sapiens
ELCCQLTFRLPFLES

SEQ ID NO: 420 - protein, 15 aa, Homo sapiens
RLPFLESLCQAVVTQ

SEQ ID NO: 421 - protein, 9 aa, Homo sapiens
KLSRALRYY

SEQ ID NO: 422 - protein, 9 aa, Homo sapiens
MVFELANSI

SEQ ID NO: 423 - protein, 9 aa, Homo sapiens
ILFQNIDGK

SEQ ID NO: 424 - protein, 9 aa, Homo sapiens
KIVIARYGK

SEQ ID NO: 425 - protein, 9 aa, Homo sapiens
FLLELLSDS

SEQ ID NO: 426 - protein, 10 aa, Homo sapiens
VTFLKPCFLL

SEQ ID NO: 427 - protein, 8 aa, Homo sapiens
TDIVKQSV

SEQ ID NO: 428 - protein, 10 aa, Homo sapiens
SPAFPKPVRP

SEQ ID NO: 429 - protein, 12 aa, Homo sapiens
SYFSLTNIFNFV

SEQ ID NO: 430 - protein, 12 aa, Homo sapiens
EFSPETCAFRLS

SEQ ID NO: 431 - protein, 9 aa, Homo sapiens
FLSRALRAL

SEQ ID NO: 432 - protein, 8 aa, Homo sapiens
KKDLELIL

SEQ ID NO: 433 - protein, 8 aa, Homo sapiens
KLQKNCLL

SEQ ID NO: 434 - protein, 9 aa, Homo sapiens
SALSGNSWV

SEQ ID NO: 435 - protein, 7 aa, Homo sapiens
TVRAILL

SEQ ID NO: 436 - protein, 10 aa, Homo sapiens
GSLHFHEVLK

SEQ ID NO: 437 - protein, 75 aa, Homo sapiens
HYKLIQQPISLFSITDRLHKTFSQLPSVHLCSITFQWGHPPIFCSTNDICVTANFCISVTFLKPCFLLHEASASQ

SEQ ID NO: 438 - protein, 40 aa, Homo sapiens
WTDIVKQSVSTNCISIKKGSYTKLFSLVFLIFCWPLIIQL

SEQ ID NO: 439 - protein, 144 aa, Homo sapiens
RTALTHNQDFSIYRLCCKRGSLCHASQARSPAFPKPVRPLPAPITRITPQLGGQSDSSQPLLTTGRPQGWQDQALRHTQQASPASCATITIPIHSAALGDHSGDPGPAWDTCPPLPLTTLIPRAPPPYGDSTARSWPSRCGPLG

SEQ ID NO: 440 - protein, 36 aa, Homo sapiens
LRYGALCNVSRISYFSLTNIFNFVIKSLTAIFTVKF

SEQ ID NO: 441 - protein, 295 aa, Homo sapiens
RKERNIRKSESTLRLSPFPTPAPSGAPAAAQGKVVRVPGPAGGLVPRDAGARLLPPAGGPGGGAAAGEGRAGRGRFPSITEPRPRDLPPRVATGRRAGGRRKGAGQGVRTRPLPASWPGGRGPFRKGPRRLPLGSGPPAAGVQRLRCSHLSRGPRRRRGRVCGRACVSPPLPPRPPPVGLSAENLSWLSSGLPRACSWREFSPETCAFRLSGLDSKLSARVERDLGALRAPGSRAAQGGGRVRGSRSEWKTRPWRPPPAWPLTRAGGPLPKNPFLESCSETAQRRRVFSFSTPLS

SEQ ID NO: 442 - protein, 67 aa, Homo sapiens
YAYKDFLWCFPFSLVFLQEIQICCHVSCLCCICCSTRICLGCLLELFLSRALRALHVLWNGFQLHCQ

SEQ ID NO: 443 - protein, 82 aa, Homo sapiens
SINKATITGKKDLELILHVSRKKPFLPRVNITPTPISCCNLKMLKKFFLLYIIISIIDLTNCLSCYLEHFYRFTFFTDVHYF

SEQ ID NO: 444 - protein, 16 aa, Homo sapiens
TMPAILKLQKNCLLSL

SEQ ID NO: 445 - protein, 84 aa, Homo sapiens
PYYSALSGNSWVPSTLESDPFGYVFSPLATRPALNDQESILWPTLTSVVSCALSCPSLNLPENWLTLITGGMKGGKKMKFTFRH

SEQ ID NO: 446 - protein, 46 aa, Homo sapiens
GLRNLGNTVRAILLSFLSKRNVKWCWGWGKPTSLGKACGRRALKLF

SEQ ID NO: 447 - protein, 22 aa, Homo sapiens
MEAENAGSLHFHEVLKMGHVKF

SEQ ID NO: 448 - DNA, 225 bp, Homo sapiens
cactacaaattaattcaacaacccatatccctcttctccatcactgataggctccataagacgttcagtcagctgccctcggtccatctctgctcaatcaccttccagtggggacacccgcccattttctgctcaacaaatgatatctgtgtcacggccaacttctgcatctcggtcacattccttaaaccgtgcttcctcctacatgaggcatctgcctcacag

SEQ ID NO: 449 - DNA, 120 bp, Homo sapiens
tggactgatatagttaagcagtctgtaagtacaaactgcatttctatcaagaaaggtagctatacaaaactgttttccttagtctttcttattttctgttggccattaattattcagttg

SEQ ID NO: 450 - DNA, 432 bp, Homo sapiens
aggaccgccctgacacacaatcaggacttctctatctacaggctctgttgcaagagggggtccctctgccacgcttcccaggccagatccccggctttcccgaagccggtcagacctcttcctgcccccatcaccagaatcaccccccaactggggggacaatctgactcgagtcaaccccttctcactacgggaagacctcaggggtggcaagatcaagctcttagacacacccagcaagccagtcctgcctcttgtgccaccatcaccattcccatccactcagctgcccttggtgaccactccggagaccctggtccagcctgggacacctgcccgccgctgccgctcactaccctcatcccccgagctcccccgccgtatggagacagcactgccaggtcctggccctcccgctgtgggcccctcggc

SEQ ID NO: 451 - DNA, 108 bp, Homo sapiens
cttcgctatggtgccttatgcaatgtaagtagaataagttatttcagtctaacaaatatatttaattttgtaattaaatcactaactgctatttttactgtgaaattt

SEQ ID NO: 452 - DNA, 885 bp, Homo sapiens
cgaaaagagagaaacatccgaaaaagtgagtccacgctgcgcctgtccccgttccccacccccgccccgtcgggggcgcccgcggccgcgcaggggaaagttgtccgggtccccgggccggcgggcgggctggtcccccgggacgctggcgctcggctcctgcccccggcgggcggcccggggggaggggcggcggcgggggaggggcgcgcgggccgcggccggttccctagcatcacggagcctcgaccccgcgacctcccgccccgggtcgccaccggccggcgggcgggaggccggcggaaaggcgccgggcagggcgtgcgcacccgtcccttgcccgcgagctggcccgggggtcgcggccctttccggaaggggccccggcgtctgccgctgggctccggcccgcccgctgcgggagtgcagcggctgcgttgctcccacctgagccgcgggccgaggaggcggaggggccgagtgtgcgggagggcgtgtgtctcgcctccccttcctccccggcccccgcctgtcggcctttctgctgagaacctaagctggttgtcaagtggtttgcctcgggcgtgttcctggcgcgagttcagccccgagacctgtgcgtttcggctctcgggtttggattcgaaactttccgctcgggttgagcgtgacttgggtgcgctgcgggcgccggggtcgcgggctgcgcagggcggtgggcgtgtgcgcgggagccggtcggagtggaaaacgcgcccgtggcggccacctccagcctggccgctcacccgagcaggggggccgctgcccaagaaccctttcctggagagctgctccgagaccgcacagcgccgccgcgtcttctccttttccactcctctctcc

SEQ ID NO: 453 - DNA, 201 bp, Homo sapiens
tatgcttacaaggactttctctggtgttttcctttttctttagtttttctccaagagattcaaatctgctgccatgttagctgtctttgctgtatctgctgtagtacacgaatatgccttggctgtttgcttgagctttttctatcccgtgctcttcgtgctcttcatgttctttggaatggctttcaacttcattgtcaa

SEQ ID NO: 454 - DNA, 246 bp, Homo sapiens
tccatcaacaaagccaccataacaggtaagaaagatctggagcttattcttcatgtgtctaggaagaaaccatttctgccaagagtcaatataacaccaacaccaatttcatgctgcaatttgaaaatgttaaagaaattctttcttctctacattatcatttctatcattgatctcacaaattgtctaagctgttatttggaacatttttaccgatttacgttttttactgatgtacattatttt

SEQ ID NO: 455 - DNA, 48 bp, Homo sapiens
accatgcctgctattttaaagttacagaagaattgtcttctctcctta

SEQ ID NO: 456 - DNA, 252 bp, Homo sapiens
ccatactacagcgcactgtcaggtaacagctgggttcccagcaccctggaaagtgacccgtttggctatgtttttagccccttagcaacacggccagctctcaatgaccaagagtccatcttgtggccgaccctgacttctgtggtttcctgtgctctatcctgcccatctcttaacttacctgagaattggctcactctcatcacaggtggaatgaaagggggaaaaaaaatgaaattcacattcagacac

SEQ ID NO: 457 - DNA, 138 bp, Homo sapiens
ggccttcgaaacctgggaaacacggtgagagctattctcctatctttcctctctaaaaggaatgtgaaatggtgctgggggtggggaaaacccacgagcttggggaaggcatgtggaaggagagctctgaagctcttc

SEQ ID NO: 458 - DNA, 66 bp, Homo sapiens
atggaagcggagaacgcgggcagtttgcattttcatgaagtgctcaaaatgggacatgtgaaattc

SEQ ID NO: 459 - DNA, 81 bp, Artificial sequence
  Codon-optimized polynucleotide
tggaagttcgagatgagctacaccgtcggcggacctccacctcatgttcatgccagacctcggcactggaaaaccgacaga

SEQ ID NO: 460 - DNA, 84 bp, Artificial sequence
  Codon-optimized polynucleotide
tatgaggccggcatgacactcggcggcaagatcctgttcttcctgttcctgctgctccctctgagccccttcagcctgatcttc

SEQ ID NO: 461 - DNA, 147 bp, Artificial sequence
  Codon-optimized polynucleotide
gatggccacagctacaccagcaaagtgaactgcctcctgctgcaggatggcttccacggctgtgtgtctattactggcgccgctggcagacggaacctgagcatctttctgtttctgatgctgtgcaagctcgagttccacgcctgc

SEQ ID NO: 462 - DNA, 99 bp, Artificial sequence
  Codon-optimized polynucleotide
acaggcggcaagtccacatgttctgcccctggacctcagagcctgcctagcacacccttcagcacataccctcagtgggtcatcctgatcaccgaactc

SEQ ID NO: 463 - DNA, 42 bp, Artificial sequence
  Codon-optimized polynucleotide
gtgctgagattcctggacctgaaagtgcgctacctgcacagc

SEQ ID NO: 464 - DNA, 54 bp, Artificial sequence
  Codon-optimized polynucleotide
gactattgggctcaaaaagagaagggcagcagcagcttcctgcggcctagctgt

SEQ ID NO: 465 - DNA, 183 bp, Artificial sequence
  Codon-optimized polynucleotide
gtccccttcagagagctgaagaacgtttccgtgctggaaggcctgagacagggcagacttggcggcccttgtagctgtcactgccccagacctagtcaggccagactgacacctgtggatgtggccggacctttcctgtgtctgggagatcctggcctgtttccacctgtgaagtccagcatc

SEQ ID NO: 466 - DNA, 177 bp, Artificial sequence
  Codon-optimized polynucleotide
ggcatggaatgcaccctgggacaagtgggagccccatctcctagaagagaagaggatggctggcgcggaggccactctagattcaaagctgatgtgcccgctcctcagggcccttgttggggaggacaacctggatctgccccatcttctgccccacctgaacagtccctgctggat

SEQ ID NO: 467 - DNA, 96 bp, Artificial sequence
  Codon-optimized polynucleotide
ggcaacacaaccctccagcaactgggagaagcctctcaggctcctagcggctctctgatccctctcagactgcctctcctgtgggaagttcggggc

SEQ ID NO: 468 - DNA, 129 bp, Artificial sequence
  Codon-optimized polynucleotide
gaggctttccaaagagctgctggcgaaggcggacctggtagaggtggtgctagaagaggtgctagggtgctgcagagcccattctgtagagcaggcgcaggcgaatggctgggccatcagagtctgaga

SEQ ID NO: 469 - DNA, 51 bp, Artificial sequence
  Codon-optimized polynucleotide
gattattgggcccagaaagaaaagatcagcatccccagaacacacctgtgc

SEQ ID NO: 470 - DNA, 48 bp, Artificial sequence
  Codon-optimized polynucleotide
gtggccatgatggtgcccgatagacaggtccactacgactttggactg

SEQ ID NO: 471 - DNA, 270 bp, Artificial sequence
  Codon-optimized polynucleotide
gtgcccttccgggaactgaagaaccagagaacagctcagggcgctcctggaatccaccatgctgcttctccagtggccgccaacctgtgtgatcctgccagacatgcccagcacaccaggattccttgtggcgctggacaagtgcgcgctggaagaggacctgaagcaggcggaggtgttctgcaacctcaaagacccgctcctgagaagcctggctgcccttgcagaagaggacagcctagactgcacaccgtgaaaatgtggcgagcc

SEQ ID NO: 472 - DNA, 33 bp, Artificial sequence
  Codon-optimized polynucleotide
aagagaagctttgccgtgaccgagcggatcatc

SEQ ID NO: 473 - DNA, 150 bp, Artificial sequence
  Codon-optimized polynucleotide
ttcaagaagttcgacggcccttgcggagaaagaggcggaggcagaacagctagagccctttgggctagaggcgacagcgttctgacaccagctctggaccctcagacacctgttagggcccctagcctgacaagagctgccgccgctgtg

SEQ ID NO: 474 - DNA, 42 bp, Artificial sequence
  Codon-optimized polynucleotide
ctggtgctgggagtgctgtctggacactctggcagcagactg

SEQ ID NO: 475 - DNA, 66 bp, Artificial sequence
  Codon-optimized polynucleotide
cagtggcagcactatcacagatctggcgaagccgccggaacacccctttggaggccaacaagaaac

SEQ ID NO: 476 - DNA, 285 bp, Artificial sequence
  Codon-optimized polynucleotide
tgccacttgtttctgcagccccaagtgggcacacctcctccacatacagcctctgctagagcacctagcggccctccacatcctcacgaatcttgtcctgccggaagaaggcctgccagagccgctcaaacatgtgccagacgacagcacggactgcctggatgtgaagaggctggaacagccagagtgcctagcctgcacctccatctgcatcaggctgctcttggagccggaagaggtagaggatggggcgaagcttgtgctcaggtgccaccttctagaggc

SEQ ID NO: 477 - DNA, 27 bp, Artificial sequence
  Codon-optimized polynucleotide
aagatccagaacaagaactgccccgac

SEQ ID NO: 478 - DNA, 225 bp, Artificial sequence
  Codon-optimized polynucleotide
cactacaagctgatccagcagccaatcagcctgttcagcatcaccgaccggctgcacaagacattcagccagctgccaagcgtgcacctgtgctccatcaccttccagtggggacaccctcctatcttttgctccaccaacgacatctgcgtgaccgccaacttctgtatcagcgtgaccttcctgaagccttgctttctgctgcacgaggccagcgcctctcag

SEQ ID NO: 479 - DNA, 432 bp, Artificial sequence
  Codon-optimized polynucleotide
cgaaccgctctgacacacaaccaggacttcagcatctacagactgtgttgcaagcggggctccctgtgccatgcaagccaagctagaagccccgcctttcctaaacctgtgcgacctctgccagctccaatcaccagaattacccctcagctcggcggccagagcgattcatctcaacctctgctgaccaccggcagacctcaaggctggcaagaccaagctctgagacacacccagcaggctagccctgcctcttgtgccaccatcacaatccccatccactctgccgctctgggcgatcattctggcgatcctggaccagcctgggacacatgtcctccactgccactcacaacactgatccctagggctcctccaccttacggcgattctaccgctagaagctggcccagcagatgtggaccactcgga

SEQ ID NO: 480 - DNA, 201 bp, Artificial sequence
  Codon-optimized polynucleotide
tacgcctacaaggacttcctgtggtgcttccccttctctctggtgttcctgcaagagatccagatctgctgtcatgtgtcctgcctgtgctgcatctgctgtagcaccagaatctgcctgggctgtctgctggaactgttcctgagcagagccctgagagcactgcacgtgctgtggaacggattccagctgcactgccag

SEQ ID NO: 481 - DNA, 48 bp, Artificial sequence
  Codon-optimized polynucleotide
acaatgcccgccatcctgaagctgcagaagaattgcctcctaagcctg

SEQ ID NO: 482 - DNA, 72 bp, Artificial sequence
  Codon-optimized polynucleotide
tacgaagccgggatgaccctgggcgagaagttcagagtgggcaactgcaagcacctgaagatgacccggcct

SEQ ID NO: 483 - DNA, 51 bp, Artificial sequence
  Codon-optimized polynucleotide
ggcgtgccaggcgatagcactcggagagccgtcagacggatgaacaccttt

SEQ ID NO: 484 - DNA, 48 bp, Artificial sequence
  Codon-optimized polynucleotide
tgtggcgcctctgcctgtgacgtgtccctgatcgctatggactccgcc

SEQ ID NO: 485 - DNA, 48 bp, Artificial sequence
  Codon-optimized polynucleotide
agcctgtaccaccgggaaaagcagctcattgccatggacagcgccatc

SEQ ID NO: 486 - DNA, 48 bp, Artificial sequence
  Codon-optimized polynucleotide
accgagtacaaccagaaactgcaagtgaaccagttcagcgagagcaag

SEQ ID NO: 487 - DNA, 72 bp, Artificial sequence
  Codon-optimized polynucleotide
accgagatcagctgctgcaccctgagcagcgaggaaaacgagtacctgcctagacctgagtggcagctgcag

SEQ ID NO: 488 - DNA, 42 bp, Artificial sequence
  Codon-optimized polynucleotide
tgcgaagagagaggcgccgcaggatctctgatctcctgcgaa

SEQ ID NO: 489 - DNA, 48 bp, Artificial sequence
  Codon-optimized polynucleotide
aacagcaagatggccctgaatagcgaggccctgtctgtggtgtctgaa

SEQ ID NO: 490 - DNA, 210 bp, Artificial sequence
  Codon-optimized polynucleotide
tggggcatggaactggccgccagcagaagattcagctgggatcatcatagcgcaggcggcccacctagagtgccatctgttagaagcggagctgcccaggtgcagcctaaagatcctctgccactgagaacactggccggctgccttgctagaacagcccatcttagacctggcgccgagtctctgcctcagccacaactgcactgtacc

SEQ ID NO: 491 - DNA, 60 bp, Artificial sequence
  Codon-optimized polynucleotide
catgtcgtcggctacggccacctggatacaagcggaagcagctctagctccagctggcct

SEQ ID NO: 492 - DNA, 105 bp, Artificial sequence
  Codon-optimized polynucleotide
aactcaaaaatggctctgaacagcctgaactccatcgacgacgcccagctgacaagaatcgcccctcctagatctcactgctgcttttgggaagtgaacgcccca

SEQ ID NO: 493 - DNA, 48 bp, Artificial sequence
  Codon-optimized polynucleotide
aagatgcactttagcctgaaagaacaccctccaccaccttgtcctcca

SEQ ID NO: 494 - DNA, 207 bp, Artificial sequence
  Codon-optimized polynucleotide
ctgtggttccagtccagcgagctgtctcctactggtgccccttggccatctagacgccctacttggagaggcaccaccgtgtcaccaagaaccgccacaagcagcgccagaacctgttgtggcacaaagtggccctccagccaagaagccgctctcggacttggaagcggactgctgaggttctcttgtggaaccgccgccattcgg

SEQ ID NO: 495 - DNA, 51 bp, Artificial sequence
  Codon-optimized polynucleotide
atcgctagagagctgcaccagttcgccttcgacctgctgatcaagagccac

SEQ ID NO: 496 - DNA, 51 bp, Artificial sequence
  Codon-optimized polynucleotide
cagcctgattcttttgccgcactgcacagctccctgaacgagctgggagag

SEQ ID NO: 497 - DNA, 51 bp, Artificial sequence
  Codon-optimized polynucleotide
ttcgtgcaaggcaaggattggggcctcaaaaagtttatccgcagagacttc

SEQ ID NO: 498 - DNA, 51 bp, Artificial sequence
  Codon-optimized polynucleotide
tttgtgcagggcaaagactggggcgtgaagaagttcatccggcgggacttc

SEQ ID NO: 499 - DNA, 204 bp, Artificial sequence
  Codon-optimized polynucleotide
cagaacctgcagaacggcggaggctctagaagctctgctacacttcctggcaggcggcggagaagatggctgagaagaaggcggcagcctatctctgtggctcctgctggacctcctagacggcccaaccagaagcctaatcctcctggcggagccagatgcgtgatcatgaggcctacatggcctggcaccagcgccttcacc

SEQ ID NO: 500 - DNA, 81 bp, Artificial sequence
  Codon-optimized polynucleotide
tggaagttcgagatgagctacaccgttggcggccctccaccacatgttcacgccagacctagacactggaaaaccgacaga

SEQ ID NO: 501 - DNA, 84 bp, Artificial sequence
  Codon-optimized polynucleotide
tacgaggccggcatgacactcggaggcaagatcctgttcttcctgttcctgctgctccctctgagccccttcagcctgatcttt

SEQ ID NO: 502 - protein, 15 aa, Homo sapiens
CQAVVTQALRFNPSF

SEQ ID NO: 503 - DNA, 99 bp, Artificial sequence
  Codon-optimized polynucleotide
acaggcggcaagagcacatgttctgcccctggacctcagtctctgcccagcacacccttcagcacataccctcagtgggtcatcctgatcaccgagctg

SEQ ID NO: 504 - DNA, 42 bp, Artificial sequence
  Codon-optimized polynucleotide
gtgctgcggttcctggatctcaaagtgcgctacctgcacagc

SEQ ID NO: 505 - DNA, 54 bp, Artificial sequence
  Codon-optimized polynucleotide
gattattgggcccagaaagaaaagggcagcagcagcttcctgcggcctagctgt

SEQ ID NO: 506 - DNA, 183 bp, Artificial sequence
  Codon-optimized polynucleotide
gtgcccttccgggaactgaagaacgtgtccgttctggaaggcctgaggcagggcagacttggcggaccttgtagctgccactgtcctagaccaagccaggccagactgacccctgtggatgtggctggcccatttctgtgtctgggcgaccctggactgttccctccagtgaagtctagcatc

SEQ ID NO: 507 - DNA, 177 bp, Artificial sequence
  Codon-optimized polynucleotide
ggcatggaatgtacactgggccaagtgggagccccatctcctagaagagaagaggatggctggcgcggaggccactctagattcaaagctgatgtgcccgctcctcagggcccttgttggggaggacaacctggatctgccccatcttctgccccacctgaacagagcctgctggat

SEQ ID NO: 508 - DNA, 96 bp, Artificial sequence
  Codon-optimized polynucleotide
ggcaacaccacactgcaacagctgggagaagcctctcaggccccaagcggttctctgatccctctcagactgcccctcctgtgggaagtgcggggc

SEQ ID NO: 509 - DNA, 129 bp, Artificial sequence
  Codon-optimized polynucleotide
gaggctttccagagagcagctggcgaaggcggacctggcagaggtggtgctagaagaggtgctagagtgctgcagagcccattctgtagagctggcgctggcgaatggctgggccaccaatctcttaga

SEQ ID NO: 510 - DNA, 51 bp, Artificial sequence
  Codon-optimized polynucleotide
gactattgggctcaaaaagagaagatcagcatccccagaacacacctgtgc

SEQ ID NO: 511 - DNA, 48 bp, Artificial sequence
  Codon-optimized polynucleotide
gtggccatgatggtgcccgacagacaggtgcactacgacttcggcctg

SEQ ID NO: 512 - DNA, 270 bp, Artificial sequence
  Codon-optimized polynucleotide
gtgcccttcagagagctgaaaaaccagagaacagcccagggcgctcctggaatccatcatgctgcttctccagtggccgccaatctgtgcgatcctgccagacatgcccagcataccaggattccttgtggcgctggacaagtgcgcgctggaagaggacctgaagctggtggcggagttctgcagcctcaaagacctgctcctgagaagcctggctgcccctgtagaagaggacagcctagactgcacaccgtgaagatgtggcgggcc

SEQ ID NO: 513 - DNA, 33 bp, Artificial sequence
  Codon-optimized polynucleotide
aagagaagcttcgccgtgaccgagcggatcatc

SEQ ID NO: 514 - DNA, 150 bp, Artificial sequence
  Codon-optimized polynucleotide
tttaagaagtttgacggcccctgcggcgagagaggcggaggaagaactgcaagagccctttgggccagaggcgactctgttctgacaccagctctggaccctcagacacctgttagggcccctagcctgacaagagctgccgctgctgtt

SEQ ID NO: 515 - DNA, 42 bp, Artificial sequence
  Codon-optimized polynucleotide
ctggtgctgggcgtgctgtctggccactctggaagcagactg

SEQ ID NO: 516 - DNA, 66 bp, Artificial sequence
  Codon-optimized polynucleotide
caatggcagcactaccacagatctggcgaagccgctggaaccccactttggaggcctaccagaaac

SEQ ID NO: 517 - DNA, 285 bp, Artificial sequence
  Codon-optimized polynucleotide
tgccacttgtttctccagccacaagtgggcacccctccacctcatacagcctctgctagagcacctagcggcccacctcatcctcacgaatcttgtcctgccggaagaaggcctgccagagccgctcaaacatgtgccagacgacagcacggactgcccggatgtgaagaagccggaacagccagagtgcctagcctgcaccttcatctgcatcaggccgctcttggagccggaagaggtagaggatggggagaagcttgtgcccaggtgccaccttctagaggc

SEQ ID NO: 518 - protein, 15 aa, Homo sapiens
LRFNPSFQEVCIYQD

SEQ ID NO: 519 - DNA, 225 bp, Artificial sequence
  Codon-optimized polynucleotide
cactacaagctgatccagcagccaatcagcctgttctccatcaccgaccggctgcacaagacattcagccagctgccttccgtgcatctgtgcagcatcaccttccagtggggacaccctcctatcttttgctccaccaacgacatctgcgtgaccgccaacttctgtatcagcgtgaccttcctgaagccttgctttctgctgcacgaggcctccgccagccag

SEQ ID NO: 520 - DNA, 432 bp, Artificial sequence
  Codon-optimized polynucleotide
cggaccgctctgacccacaaccaggacttcagcatctaccggctgtgctgcaagaggggctctctgtgtcatgctagccaggctagaagccccgcctttcctaagcctgtcagacctctgcctgctcctatcaccagaatcacccctcagctcggcggccagtctgattcatctcagccactgctgaccaccggcagacctcaaggatggcaagaccaggctctgagacacacacagcaggctagcccagcctcttgcgccaccatcacaataccaatacattctgccgctctgggcgatcacagcggagatcctggacctgcctgggatacttgtcctcctctgcccctaactacactgatccctagggctcctccaccttacggcgatagcacagccagatcctggcctagcagatgtggccctctgggc

SEQ ID NO: 521 - DNA, 201 bp, Artificial sequence
  Codon-optimized polynucleotide
tacgcctacaaggacttcctgtggtgcttccccttctctctggtgttcctgcaagaaatccagatctgctgtcacgtgtcctgcctgtgctgtatctgctgtagcacccggatctgtctgggctgtctgctggaactgttcctgagcagagccctgagagcactgcacgtgctgtggaacggattccagctgcactgccag

SEQ ID NO: 522 - DNA, 48 bp, Artificial sequence
  Codon-optimized polynucleotide
accatgcctgccattctgaagctgcagaagaattgtcttctaagcctg

SEQ ID NO: 523 - DNA, 72 bp, Artificial sequence
  Codon-optimized polynucleotide
tatgaggctggaatgaccctgggcgagaagttcagagtgggcaactgcaagcacctgaagatgacccggcct

SEQ ID NO: 524 - DNA, 51 bp, Artificial sequence
  Codon-optimized polynucleotide
ggagtgcctggcgattctactagaagggccgtgcggcggatgaacaccttt

SEQ ID NO: 525 - DNA, 48 bp, Artificial sequence
  Codon-optimized polynucleotide
tgtggcgcatctgcctgcgacgtgtccctgatcgctatggatagcgcc

SEQ ID NO: 526 - protein, 11 aa, Homo sapiens
EVCIYQDTDLM

SEQ ID NO: 527 - protein, 15 aa, Homo sapiens
WCPLDLRLGSTGCLT

SEQ ID NO: 528 - DNA, 72 bp, Artificial sequence
  Codon-optimized polynucleotide
accgagatcagctgctgcaccctgagcagcgaggaaaacgagtacctgcctagacctgaatggcagctgcag

SEQ ID NO: 529 - DNA, 42 bp, Artificial sequence
  Codon-optimized polynucleotide
tgcgaggaaagaggcgcagccggatctctgatctcttgcgag

SEQ ID NO: 530 - DNA, 48 bp, Artificial sequence
  Codon-optimized polynucleotide
aacagcaagatggccctgaatagcgaggccctgtctgtggtgtccgag

SEQ ID NO: 531 - DNA, 210 bp, Artificial sequence
  Codon-optimized polynucleotide
tggggaatggaactggccgctagcaggcggtttagctgggatcatcattctgccggcggacctccaagagtgccaagcgttagaagcggagcagcccaggtccagcctaaagatccactgccactgagaacactggccggctgccttgccagaacagctcatcttagacctggcgccgaaagcctgcctcaacctcagctgcattgcaca

SEQ ID NO: 532 - DNA, 60 bp, Artificial sequence
  Codon-optimized polynucleotide
cacgttgtcggctatggccacctggatacaagcggctcctctagcagtagctcctggcct

SEQ ID NO: 533 - DNA, 105 bp, Artificial sequence
  Codon-optimized polynucleotide
aattctaagatggctctcaacagcctgaactccatcgacgacgcccagctgacaagaatcgcccctccaagaagccactgttgcttttgggaagtgaacgcccct

SEQ ID NO: 534 - DNA, 48 bp, Artificial sequence
  Codon-optimized polynucleotide
aagatgcacttctcactgaaagagcacccgccaccgccgtgcccaccg

SEQ ID NO: 535 - DNA, 207 bp, Artificial sequence
  Codon-optimized polynucleotide
ctgtggttccagtccagcgaactgtctcctactggcgctccatggccaagcagaaggcctacttggagaggcaccaccgtgtctccaagaaccgctacaagcagcgccagaacctgttgcggcacaaaatggccctccagccaagaagctgccctcggacttggaagcggactgctgagattcagctgtggcacagccgccatcaga

SEQ ID NO: 536 - DNA, 51 bp, Artificial sequence
  Codon-optimized polynucleotide
atcgccagagaactgcaccagttcgccttcgacctgctgatcaagagccac

SEQ ID NO: 537 - DNA, 51 bp, Artificial sequence
  Codon-optimized polynucleotide
cagcctgacagctttgctgccctgcatagctccctgaatgagctgggcgaa

SEQ ID NO: 538 - DNA, 51 bp, Artificial sequence
  Codon-optimized polynucleotide
tttgtgcagggtaaagattggggcctcaaaaagtttatcagacgggacttc

SEQ ID NO: 539 - DNA, 51 bp, Artificial sequence
  Codon-optimized polynucleotide
ttcgtgcagggcaaagactggggcgtgaagaagttcatccggcgggacttt

SEQ ID NO: 540 - DNA, 204 bp, Artificial sequence
  Codon-optimized polynucleotide
cagaacctgcagaacggcggaggctctagaagctctgctacacttcctggcaggcggcggagaagatggctgagaagaaggcggcagcctatctctgtggctcctgctggacctcctagacggcccaaccagaagcctaatcctcctggcggagccagatgcgtgatcatgaggcctacatggcctggcaccagcgcctttacc

SEQ ID NO: 541 - protein, 1479 aa, Artificial sequence
  Heterologous protein
QNLQNGGGSRSSATLPGRRRRRWLRRRRQPISVAPAGPPRRPNQKPNPPGGARCVIMRPTWPGTSAFTKRSFAVTERIIDYWAQKEKGSSSFLRPSCDYWAQKEKISIPRTHLCLVLGVLSGHSGSRLYEAGMTLGGKILFFLFLLLPLSPFSLIFTEISCCTLSSEENEYLPRPEWQLQVPFRELKNVSVLEGLRQGRLGGPCSCHCPRPSQARLTPVDVAGPFLCLGDPGLFPPVKSSITGGKSTCSAPGPQSLPSTPFSTYPQWVILITELGMECTLGQVGAPSPRREEDGWRGGHSRFKADVPAPQGPCWGGQPGSAPSSAPPEQSLLDWKFEMSYTVGGPPPHVHARPRHWKTDRDGHSYTSKVNCLLLQDGFHGCVSITGAAGRRNLSIFLFLMLCKLEFHACKIQNKNCPDFKKFDGPCGERGGGRTARALWARGDSVLTPALDPQTPVRAPSLTRAAAAVHYKLIQQPISLFSITDRLHKTFSQLPSVHLCSITFQWGHPPIFCSTNDICVTANFCISVTFLKPCFLLHEASASQCHLFLQPQVGTPPPHTASARAPSGPPHPHESCPAGRRPARAAQTCARRQHGLPGCEEAGTARVPSLHLHLHQAALGAGRGRGWGEACAQVPPSRGVLRFLDLKVRYLHSQWQHYHRSGEAAGTPLWRPTRNVPFRELKNQRTAQGAPGIHHAASPVAANLCDPARHAQHTRIPCGAGQVRAGRGPEAGGGVLQPQRPAPEKPGCPCRRGQPRLHTVKMWRAVAMMVPDRQVHYDFGLGVPGDSTRRAVRRMNTFYEAGMTLGEKFRVGNCKHLKMTRPNSKMALNSEALSVVSECGASACDVSLIAMDSAFVQGKDWGVKKFIRRDFYAYKDFLWCFPFSLVFLQEIQICCHVSCLCCICCSTRICLGCLLELFLSRALRALHVLWNGFQLHCQTEYNQKLQVNQFSESKSLYHREKQLIAMDSAICEERGAAGSLISCETMPAILKLQKNCLLSLRTALTHNQDFSIYRLCCKRGSLCHASQARSPAFPKPVRPLPAPITRITPQLGGQSDSSQPLLTTGRPQGWQDQALRHTQQASPASCATITIPIHSAALGDHSGDPGPAWDTCPPLPLTTLIPRAPPPYGDSTARSWPSRCGPLGGNTTLQQLGEASQAPSGSLIPLRLPLLWEVRGQPDSFAALHSSLNELGEIARELHQFAFDLLIKSHFVQGKDWGLKKFIRRDFWGMELAASRRFSWDHHSAGGPPRVPSVRSGAAQVQPKDPLPLRTLAGCLARTAHLRPGAESLPQPQLHCTLWFQSSELSPTGAPWPSRRPTWRGTTVSPRTATSSARTCCGTKWPSSQEAALGLGSGLLRFSCGTAAIRKMHFSLKEHPPPPCPPEAFQRAAGEGGPGRGGARRGARVLQSPFCRAGAGEWLGHQSLRHVVGYGHLDTSGSSSSSSWPNSKMALNSLNSIDDAQLTRIAPPRSHCCFWEVNAP

SEQ ID NO: 542 - DNA, 4437 bp, Artificial sequence
  Heterologous polynucleotide
cagaacctgcagaacggcggaggctctagaagctctgctacacttcctggcaggcggcggagaagatggctgagaagaaggcggcagcctatctctgtggctcctgctggacctcctagacggcccaaccagaagcctaatcctcctggcggagccagatgcgtgatcatgaggcctacatggcctggcaccagcgccttcaccaagagaagctttgccgtgaccgagcggatcatcgactattgggctcaaaaagagaagggcagcagcagcttcctgcggcctagctgtgattattgggcccagaaagaaaagatcagcatccccagaacacacctgtgcctggtgctgggagtgctgtctggacactctggcagcagactgtatgaggccggcatgacactcggcggcaagatcctgttcttcctgttcctgctgctccctctgagccccttcagcctgatcttcaccgagatcagctgctgcaccctgagcagcgaggaaaacgagtacctgcctagacctgagtggcagctgcaggtccccttcagagagctgaagaacgtttccgtgctggaaggcctgagacagggcagacttggcggcccttgtagctgtcactgccccagacctagtcaggccagactgacacctgtggatgtggccggacctttcctgtgtctgggagatcctggcctgtttccacctgtgaagtccagcatcacaggcggcaagtccacatgttctgcccctggacctcagagcctgcctagcacacccttcagcacataccctcagtgggtcatcctgatcaccgaactcggcatggaatgcaccctgggacaagtgggagccccatctcctagaagagaagaggatggctggcgcggaggccactctagattcaaagctgatgtgcccgctcctcagggcccttgttggggaggacaacctggatctgccccatcttctgccccacctgaacagtccctgctggattggaagttcgagatgagctacaccgtcggcggacctccacctcatgttcatgccagacctcggcactggaaaaccgacagagatggccacagctacaccagcaaagtgaactgcctcctgctgcaggatggcttccacggctgtgtgtctattactggcgccgctggcagacggaacctgagcatctttctgtttctgatgctgtgcaagctcgagttccacgcctgcaagatccagaacaagaactgccccgacttcaagaagttcgacggcccttgcggagaaagaggcggaggcagaacagctagagccctttgggctagaggcgacagcgttctgacaccagctctggaccctcagacacctgttagggcccctagcctgacaagagctgccgccgctgtgcactacaagctgatccagcagccaatcagcctgttcagcatcaccgaccggctgcacaagacattcagccagctgccaagcgtgcacctgtgctccatcaccttccagtggggacaccctcctatcttttgctccaccaacgacatctgcgtgaccgccaacttctgtatcagcgtgaccttcctgaagccttgctttctgctgcacgaggccagcgcctctcagtgccacttgtttctgcagccccaagtgggcacacctcctccacatacagcctctgctagagcacctagcggccctccacatcctcacgaatcttgtcctgccggaagaaggcctgccagagccgctcaaacatgtgccagacgacagcacggactgcctggatgtgaagaggctggaacagccagagtgcctagcctgcacctccatctgcatcaggctgctcttggagccggaagaggtagaggatggggcgaagcttgtgctcaggtgccaccttctagaggcgtgctgagattcctggacctgaaagtgcgctacctgcacagccagtggcagcactatcacagatctggcgaagccgccggaacacccctttggaggccaacaagaaacgtgcccttccgggaactgaagaaccagagaacagctcagggcgctcctggaatccaccatgctgcttctccagtggccgccaacctgtgtgatcctgccagacatgcccagcacaccaggattccttgtggcgctggacaagtgcgcgctggaagaggacctgaagcaggcggaggtgttctgcaacctcaaagacccgctcctgagaagcctggctgcccttgcagaagaggacagcctagactgcacaccgtgaaaatgtggcgagccgtggccatgatggtgcccgatagacaggtccactacgactttggactgggcgtgccaggcgatagcactcggagagccgtcagacggatgaacaccttttacgaagccgggatgaccctgggcgagaagttcagagtgggcaactgcaagcacctgaagatgacccggcctaacagcaagatggccctgaatagcgaggccctgtctgtggtgtctgaatgtggcgcctctgcctgtgacgtgtccctgatcgctatggactccgcctttgtgcagggcaaagactggggcgtgaagaagttcatccggcgggacttctacgcctacaaggacttcctgtggtgcttccccttctctctggtgttcctgcaagagatccagatctgctgtcatgtgtcctgcctgtgctgcatctgctgtagcaccagaatctgcctgggctgtctgctggaactgttcctgagcagagccctgagagcactgcacgtgctgtggaacggattccagctgcactgccagaccgagtacaaccagaaactgcaagtgaaccagttcagcgagagcaagagcctgtaccaccgggaaaagcagctcattgccatggacagcgccatctgcgaagagagaggcgccgcaggatctctgatctcctgcgaaacaatgcccgccatcctgaagctgcagaagaattgcctcctaagcctgcgaaccgctctgacacacaaccaggacttcagcatctacagactgtgttgcaagcggggctccctgtgccatgcaagccaagctagaagccccgcctttcctaaacctgtgcgacctctgccagctccaatcaccagaattacccctcagctcggcggccagagcgattcatctcaacctctgctgaccaccggcagacctcaaggctggcaagaccaagctctgagacacacccagcaggctagccctgcctcttgtgccaccatcacaatccccatccactctgccgctctgggcgatcattctggcgatcctggaccagcctgggacacatgtcctccactgccactcacaacactgatccctagggctcctccaccttacggcgattctaccgctagaagctggcccagcagatgtggaccactcggaggcaacacaaccctccagcaactgggagaagcctctcaggctcctagcggctctctgatccctctcagactgcctctcctgtgggaagttcggggccagcctgattcttttgccgcactgcacagctccctgaacgagctgggagagatcgctagagagctgcaccagttcgccttcgacctgctgatcaagagccacttcgtgcaaggcaaggattggggcctcaaaaagtttatccgcagagacttctggggcatggaactggccgccagcagaagattcagctgggatcatcatagcgcaggcggcccacctagagtgccatctgttagaagcggagctgcccaggtgcagcctaaagatcctctgccactgagaacactggccggctgccttgctagaacagcccatcttagacctggcgccgagtctctgcctcagccacaactgcactgtaccctgtggttccagtccagcgagctgtctcctactggtgccccttggccatctagacgccctacttggagaggcaccaccgtgtcaccaagaaccgccacaagcagcgccagaacctgttgtggcacaaagtggccctccagccaagaagccgctctcggacttggaagcggactgctgaggttctcttgtggaaccgccgccattcggaagatgcactttagcctgaaagaacaccctccaccaccttgtcctccagaggctttccaaagagctgctggcgaaggcggacctggtagaggtggtgctagaagaggtgctagggtgctgcagagcccattctgtagagcaggcgcaggcgaatggctgggccatcagagtctgagacatgtcgtcggctacggccacctggatacaagcggaagcagctctagctccagctggcctaactcaaaaatggctctgaacagcctgaactccatcgacgacgcccagctgacaagaatcgcccctcctagatctcactgctgcttttgggaagtgaacgcccca

SEQ ID NO: 543 - protein, 1479 aa, Artificial sequence
  Hetereologous protein
QNLQNGGGSRSSATLPGRRRRRWLRRRRQPISVAPAGPPRRPNQKPNPPGGARCVIMRPTWPGTSAFTGMECTLGQVGAPSPRREEDGWRGGHSRFKADVPAPQGPCWGGQPGSAPSSAPPEQSLLDDYWAQKEKISIPRTHLCWKFEMSYTVGGPPPHVHARPRHWKTDRDYWAQKEKGSSSFLRPSCVPFRELKNVSVLEGLRQGRLGGPCSCHCPRPSQARLTPVDVAGPFLCLGDPGLFPPVKSSITEISCCTLSSEENEYLPRPEWQLQYEAGMTLGGKILFFLFLLLPLSPFSLIFLVLGVLSGHSGSRLKRSFAVTERIITGGKSTCSAPGPQSLPSTPFSTYPQWVILITELDGHSYTSKVNCLLLQDGFHGCVSITGAAGRRNLSIFLFLMLCKLEFHACQWQHYHRSGEAAGTPLWRPTRNVAMMVPDRQVHYDFGLKIQNKNCPDVLRFLDLKVRYLHSVPFRELKNQRTAQGAPGIHHAASPVAANLCDPARHAQHTRIPCGAGQVRAGRGPEAGGGVLQPQRPAPEKPGCPCRRGQPRLHTVKMWRACHLFLQPQVGTPPPHTASARAPSGPPHPHESCPAGRRPARAAQTCARRQHGLPGCEEAGTARVPSLHLHLHQAALGAGRGRGWGEACAQVPPSRGHYKLIQQPISLFSITDRLHKTFSQLPSVHLCSITFQWGHPPIFCSTNDICVTANFCISVTFLKPCFLLHEASASQFKKFDGPCGERGGGRTARALWARGDSVLTPALDPQTPVRAPSLTRAAAAVGVPGDSTRRAVRRMNTFCGASACDVSLIAMDSACEERGAAGSLISCESLYHREKQLIAMDSAIFVQGKDWGVKKFIRRDFTMPAILKLQKNCLLSLNSKMALNSEALSVVSEYEAGMTLGEKFRVGNCKHLKMTRPTEYNQKLQVNQFSESKRTALTHNQDFSIYRLCCKRGSLCHASQARSPAFPKPVRPLPAPITRITPQLGGQSDSSQPLLTTGRPQGWQDQALRHTQQASPASCATITIPIHSAALGDHSGDPGPAWDTCPPLPLTTLIPRAPPPYGDSTARSWPSRCGPLGYAYKDFLWCFPFSLVFLQEIQICCHVSCLCCICCSTRICLGCLLELFLSRALRALHVLWNGFQLHCQGNTTLQQLGEASQAPSGSLIPLRLPLLWEVRGNSKMALNSLNSIDDAQLTRIAPPRSHCCFWEVNAPFVQGKDWGLKKFIRRDFEAFQRAAGEGGPGRGGARRGARVLQSPFCRAGAGEWLGHQSLRWGMELAASRRFSWDHHSAGGPPRVPSVRSGAAQVQPKDPLPLRTLAGCLARTAHLRPGAESLPQPQLHCTIARELHQFAFDLLIKSHKMHFSLKEHPPPPCPPHVVGYGHLDTSGSSSSSSWPQPDSFAALHSSLNELGELWFQSSELSPTGAPWPSRRPTWRGTTVSPRTATSSARTCCGTKWPSSQEAALGLGSGLLRFSCGTAAIR

SEQ ID NO: 544 - DNA, 4437 bp, Artificial sequence
  Heterologous polynucleotide
cagaacctgcagaacggcggaggctctagaagctctgctacacttcctggcaggcggcggagaagatggctgagaagaaggcggcagcctatctctgtggctcctgctggacctcctagacggcccaaccagaagcctaatcctcctggcggagccagatgcgtgatcatgaggcctacatggcctggcaccagcgcctttaccggcatggaatgtacactgggccaagtgggagccccatctcctagaagagaagaggatggctggcgcggaggccactctagattcaaagctgatgtgcccgctcctcagggcccttgttggggaggacaacctggatctgccccatcttctgccccacctgaacagagcctgctggatgactattgggctcaaaaagagaagatcagcatccccagaacacacctgtgctggaagttcgagatgagctacaccgttggcggccctccaccacatgttcacgccagacctagacactggaaaaccgacagagattattgggcccagaaagaaaagggcagcagcagcttcctgcggcctagctgtgtgcccttccgggaactgaagaacgtgtccgttctggaaggcctgaggcagggcagacttggcggaccttgtagctgccactgtcctagaccaagccaggccagactgacccctgtggatgtggctggcccatttctgtgtctgggcgaccctggactgttccctccagtgaagtctagcatcaccgagatcagctgctgcaccctgagcagcgaggaaaacgagtacctgcctagacctgaatggcagctgcagtacgaggccggcatgacactcggaggcaagatcctgttcttcctgttcctgctgctccctctgagccccttcagcctgatctttctggtgctgggcgtgctgtctggccactctggaagcagactgaagagaagcttcgccgtgaccgagcggatcatcacaggcggcaagagcacatgttctgcccctggacctcagtctctgcccagcacacccttcagcacataccctcagtgggtcatcctgatcaccgagctggatggccacagctacaccagcaaagtgaactgcctcctgctgcaggatggcttccacggctgtgtgtctattactggcgccgctggcagacggaacctgagcatctttctgtttctgatgctgtgcaagctcgagttccacgcctgccaatggcagcactaccacagatctggcgaagccgctggaaccccactttggaggcctaccagaaacgtggccatgatggtgcccgacagacaggtgcactacgacttcggcctgaagatccagaacaagaactgccccgacgtgctgcggttcctggatctcaaagtgcgctacctgcacagcgtgcccttcagagagctgaaaaaccagagaacagcccagggcgctcctggaatccatcatgctgcttctccagtggccgccaatctgtgcgatcctgccagacatgcccagcataccaggattccttgtggcgctggacaagtgcgcgctggaagaggacctgaagctggtggcggagttctgcagcctcaaagacctgctcctgagaagcctggctgcccctgtagaagaggacagcctagactgcacaccgtgaagatgtggcgggcctgccacttgtttctccagccacaagtgggcacccctccacctcatacagcctctgctagagcacctagcggcccacctcatcctcacgaatcttgtcctgccggaagaaggcctgccagagccgctcaaacatgtgccagacgacagcacggactgcccggatgtgaagaagccggaacagccagagtgcctagcctgcaccttcatctgcatcaggccgctcttggagccggaagaggtagaggatggggagaagcttgtgcccaggtgccaccttctagaggccactacaagctgatccagcagccaatcagcctgttctccatcaccgaccggctgcacaagacattcagccagctgccttccgtgcatctgtgcagcatcaccttccagtggggacaccctcctatcttttgctccaccaacgacatctgcgtgaccgccaacttctgtatcagcgtgaccttcctgaagccttgctttctgctgcacgaggcctccgccagccagtttaagaagtttgacggcccctgcggcgagagaggcggaggaagaactgcaagagccctttgggccagaggcgactctgttctgacaccagctctggaccctcagacacctgttagggcccctagcctgacaagagctgccgctgctgttggagtgcctggcgattctactagaagggccgtgcggcggatgaacaccttttgtggcgcatctgcctgcgacgtgtccctgatcgctatggatagcgcctgcgaggaaagaggcgcagccggatctctgatctcttgcgagagcctgtaccaccgggaaaagcagctcattgccatggacagcgccatcttcgtgcagggcaaagactggggcgtgaagaagttcatccggcgggactttaccatgcctgccattctgaagctgcagaagaattgtcttctaagcctgaacagcaagatggccctgaatagcgaggccctgtctgtggtgtccgagtatgaggctggaatgaccctgggcgagaagttcagagtgggcaactgcaagcacctgaagatgacccggcctaccgagtacaaccagaaactgcaagtgaaccagttcagcgagagcaagcggaccgctctgacccacaaccaggacttcagcatctaccggctgtgctgcaagaggggctctctgtgtcatgctagccaggctagaagccccgcctttcctaagcctgtcagacctctgcctgctcctatcaccagaatcacccctcagctcggcggccagtctgattcatctcagccactgctgaccaccggcagacctcaaggatggcaagaccaggctctgagacacacacagcaggctagcccagcctcttgcgccaccatcacaataccaatacattctgccgctctgggcgatcacagcggagatcctggacctgcctgggatacttgtcctcctctgcccctaactacactgatccctagggctcctccaccttacggcgatagcacagccagatcctggcctagcagatgtggccctctgggctacgcctacaaggacttcctgtggtgcttccccttctctctggtgttcctgcaagaaatccagatctgctgtcacgtgtcctgcctgtgctgtatctgctgtagcacccggatctgtctgggctgtctgctggaactgttcctgagcagagccctgagagcactgcacgtgctgtggaacggattccagctgcactgccagggcaacaccacactgcaacagctgggagaagcctctcaggccccaagcggttctctgatccctctcagactgcccctcctgtgggaagtgcggggcaattctaagatggctctcaacagcctgaactccatcgacgacgcccagctgacaagaatcgcccctccaagaagccactgttgcttttgggaagtgaacgccccttttgtgcagggtaaagattggggcctcaaaaagtttatcagacgggacttcgaggctttccagagagcagctggcgaaggcggacctggcagaggtggtgctagaagaggtgctagagtgctgcagagcccattctgtagagctggcgctggcgaatggctgggccaccaatctcttagatggggaatggaactggccgctagcaggcggtttagctgggatcatcattctgccggcggacctccaagagtgccaagcgttagaagcggagcagcccaggtccagcctaaagatccactgccactgagaacactggccggctgccttgccagaacagctcatcttagacctggcgccgaaagcctgcctcaacctcagctgcattgcacaatcgccagagaactgcaccagttcgccttcgacctgctgatcaagagccacaagatgcacttctcactgaaagagcacccgccaccgccgtgcccaccgcacgttgtcggctatggccacctggatacaagcggctcctctagcagtagctcctggcctcagcctgacagctttgctgccctgcatagctccctgaatgagctgggcgaactgtggttccagtccagcgaactgtctcctactggcgctccatggccaagcagaaggcctacttggagaggcaccaccgtgtctccaagaaccgctacaagcagcgccagaacctgttgcggcacaaaatggccctccagccaagaagctgccctcggacttggaagcggactgctgagattcagctgtggcacagccgccatcaga

SEQ ID NO: 545 - DNA, 15 bp, Homo sapiens
cgcgacttcgccgcc

SEQ ID NO: 546 - DNA, 84 bp, Artificial sequence
  T cell enhancer
atgggccagaaagagcagatccacacactgcagaaaaacagcgagcggatgagcaagcagctgaccagatcttctcaggccgtg

SEQ ID NO: 547 - DNA, 21 bp, Artificial sequence
  Tag sequence
agccatcaccatcaccaccat

SEQ ID NO: 548 - protein, 12 aa, Homo sapiens
IKSLTAIFTVKF

SEQ ID NO: 549 - protein, 28 aa, Artificial sequence
  T cell enhancer
MGQKEQIHTLQKNSERMSKQLTRSSQAV

SEQ ID NO: 550 - protein, 1507 aa, Artificial sequence
  Heterologous polypeptide
MGQKEQIHTLQKNSERMSKQLTRSSQAVQNLQNGGGSRSSATLPGRRRRRWLRRRRQPISVAPAGPPRRPNQKPNPPGGARCVIMRPTWPGTSAFTKRSFAVTERIIDYWAQKEKGSSSFLRPSCDYWAQKEKISIPRTHLCLVLGVLSGHSGSRLYEAGMTLGGKILFFLFLLLPLSPFSLIFTEISCCTLSSEENEYLPRPEWQLQVPFRELKNVSVLEGLRQGRLGGPCSCHCPRPSQARLTPVDVAGPFLCLGDPGLFPPVKSSITGGKSTCSAPGPQSLPSTPFSTYPQWVILITELGMECTLGQVGAPSPRREEDGWRGGHSRFKADVPAPQGPCWGGQPGSAPSSAPPEQSLLDWKFEMSYTVGGPPPHVHARPRHWKTDRDGHSYTSKVNCLLLQDGFHGCVSITGAAGRRNLSIFLFLMLCKLEFHACKIQNKNCPDFKKFDGPCGERGGGRTARALWARGDSVLTPALDPQTPVRAPSLTRAAAAVHYKLIQQPISLFSITDRLHKTFSQLPSVHLCSITFQWGHPPIFCSTNDICVTANFCISVTFLKPCFLLHEASASQCHLFLQPQVGTPPPHTASARAPSGPPHPHESCPAGRRPARAAQTCARRQHGLPGCEEAGTARVPSLHLHLHQAALGAGRGRGWGEACAQVPPSRGVLRFLDLKVRYLHSQWQHYHRSGEAAGTPLWRPTRNVPFRELKNQRTAQGAPGIHHAASPVAANLCDPARHAQHTRIPCGAGQVRAGRGPEAGGGVLQPQRPAPEKPGCPCRRGQPRLHTVKMWRAVAMMVPDRQVHYDFGLGVPGDSTRRAVRRMNTFYEAGMTLGEKFRVGNCKHLKMTRPNSKMALNSEALSVVSECGASACDVSLIAMDSAFVQGKDWGVKKFIRRDFYAYKDFLWCFPFSLVFLQEIQICCHVSCLCCICCSTRICLGCLLELFLSRALRALHVLWNGFQLHCQTEYNQKLQVNQFSESKSLYHREKQLIAMDSAICEERGAAGSLISCETMPAILKLQKNCLLSLRTALTHNQDFSIYRLCCKRGSLCHASQARSPAFPKPVRPLPAPITRITPQLGGQSDSSQPLLTTGRPQGWQDQALRHTQQASPASCATITIPIHSAALGDHSGDPGPAWDTCPPLPLTTLIPRAPPPYGDSTARSWPSRCGPLGGNTTLQQLGEASQAPSGSLIPLRLPLLWEVRGQPDSFAALHSSLNELGEIARELHQFAFDLLIKSHFVQGKDWGLKKFIRRDFWGMELAASRRFSWDHHSAGGPPRVPSVRSGAAQVQPKDPLPLRTLAGCLARTAHLRPGAESLPQPQLHCTLWFQSSELSPTGAPWPSRRPTWRGTTVSPRTATSSARTCCGTKWPSSQEAALGLGSGLLRFSCGTAAIRKMHFSLKEHPPPPCPPEAFQRAAGEGGPGRGGARRGARVLQSPFCRAGAGEWLGHQSLRHVVGYGHLDTSGSSSSSSWPNSKMALNSLNSIDDAQLTRIAPPRSHCCFWEVNAP

SEQ ID NO: 551 - protein, 5703 aa, Artificial sequence
  Heterologous polypeptide
CCATTGCATACGTTGTATCCATATCATAATATGTACATTTATATTGGCTCATGTCCAACATTACCGCCATGTTGACATTGATTATTGACTAGTTATTAATAGTAATCAATTACGGGGTCATTAGTTCATAGCCCATATATGGAGTTCCGCGTTACATAACTTACGGTAAATGGCCCGCCTGGCTGACCGCCCAACGACCCCCGCCCATTGACGTCAATAATGACGTATGTTCCCATAGTAACGCCAATAGGGACTTTCCATTGACGTCAATGGGTGGAGTATTTACGGTAAACTGCCCACTTGGCAGTACATCAAGTGTATCATATGCCAAGTACGCCCCCTATTGACGTCAATGACGGTAAATGGCCCGCCTGGCATTATGCCCAGTACATGACCTTATGGGACTTTCCTACTTGGCAGTACATCTACGTATTAGTCATCGCTATTACCATGGTGATGCGGTTTTGGCAGTACATCAATGGGCGTGGATAGCGGTTTGACTCACGGGGATTTCCAAGTCTCCACCCCATTGACGTCAATGGGAGTTTGTTTTGGCACCAAAATCAACGGGACTTTCCAAAATGTCGTAACAACTCCGCCCCATTGACGCAAATGGGCGGTAGGCGTGTACGGTGGGAGGTCTATATAAGCAGAGCTCTCCCTATCAGTGATAGAGATCTCCCTATCAGTGATAGAGATCGTCGACGAGCTCGTTTAGTGAACCGTCAGATCGCCTGGAGACGCCATCCACGCTGTTTTGACCTCCATAGAAGACACCGGGACCGATCCAGCCTCCGCGGCCGGGAACGGTGCATTGGAACGCGGATTCCCCGTGCCAAGAGTGAGATCTTCCGTTTATCTAGGTACCAGATATCAGAATTCGGATCCCGCGACTTCGCCGCCATGGGCCAGAAAGAGCAGATCCACACACTGCAGAAAAACAGCGAGCGGATGAGCAAGCAGCTGACCAGATCTTCTCAGGCCGTGCAGAACCTGCAGAACGGCGGAGGCTCTAGAAGCTCTGCTACACTTCCTGGCAGGCGGCGGAGAAGATGGCTGAGAAGAAGGCGGCAGCCTATCTCTGTGGCTCCTGCTGGACCTCCTAGACGGCCCAACCAGAAGCCTAATCCTCCTGGCGGAGCCAGATGCGTGATCATGAGGCCTACATGGCCTGGCACCAGCGCCTTCACCAAGAGAAGCTTTGCCGTGACCGAGCGGATCATCGACTATTGGGCTCAAAAAGAGAAGGGCAGCAGCAGCTTCCTGCGGCCTAGCTGTGATTATTGGGCCCAGAAAGAAAAGATCAGCATCCCCAGAACACACCTGTGCCTGGTGCTGGGAGTGCTGTCTGGACACTCTGGCAGCAGACTGTATGAGGCCGGCATGACACTCGGCGGCAAGATCCTGTTCTTCCTGTTCCTGCTGCTCCCTCTGAGCCCCTTCAGCCTGATCTTCACCGAGATCAGCTGCTGCACCCTGAGCAGCGAGGAAAACGAGTACCTGCCTAGACCTGAGTGGCAGCTGCAGGTCCCCTTCAGAGAGCTGAAGAACGTTTCCGTGCTGGAAGGCCTGAGACAGGGCAGACTTGGCGGCCCTTGTAGCTGTCACTGCCCCAGACCTAGTCAGGCCAGACTGACACCTGTGGATGTGGCCGGACCTTTCCTGTGTCTGGGAGATCCTGGCCTGTTTCCACCTGTGAAGTCCAGCATCACAGGCGGCAAGTCCACATGTTCTGCCCCTGGACCTCAGAGCCTGCCTAGCACACCCTTCAGCACATACCCTCAGTGGGTCATCCTGATCACCGAACTCGGCATGGAATGCACCCTGGGACAAGTGGGAGCCCCATCTCCTAGAAGAGAAGAGGATGGCTGGCGCGGAGGCCACTCTAGATTCAAAGCTGATGTGCCCGCTCCTCAGGGCCCTTGTTGGGGAGGACAACCTGGATCTGCCCCATCTTCTGCCCCACCTGAACAGTCCCTGCTGGATTGGAAGTTCGAGATGAGCTACACCGTCGGCGGACCTCCACCTCATGTTCATGCCAGACCTCGGCACTGGAAAACCGACAGAGATGGCCACAGCTACACCAGCAAAGTGAACTGCCTCCTGCTGCAGGATGGCTTCCACGGCTGTGTGTCTATTACTGGCGCCGCTGGCAGACGGAACCTGAGCATCTTTCTGTTTCTGATGCTGTGCAAGCTCGAGTTCCACGCCTGCAAGATCCAGAACAAGAACTGCCCCGACTTCAAGAAGTTCGACGGCCCTTGCGGAGAAAGAGGCGGAGGCAGAACAGCTAGAGCCCTTTGGGCTAGAGGCGACAGCGTTCTGACACCAGCTCTGGACCCTCAGACACCTGTTAGGGCCCCTAGCCTGACAAGAGCTGCCGCCGCTGTGCACTACAAGCTGATCCAGCAGCCAATCAGCCTGTTCAGCATCACCGACCGGCTGCACAAGACATTCAGCCAGCTGCCAAGCGTGCACCTGTGCTCCATCACCTTCCAGTGGGGACACCCTCCTATCTTTTGCTCCACCAACGACATCTGCGTGACCGCCAACTTCTGTATCAGCGTGACCTTCCTGAAGCCTTGCTTTCTGCTGCACGAGGCCAGCGCCTCTCAGTGCCACTTGTTTCTGCAGCCCCAAGTGGGCACACCTCCTCCACATACAGCCTCTGCTAGAGCACCTAGCGGCCCTCCACATCCTCACGAATCTTGTCCTGCCGGAAGAAGGCCTGCCAGAGCCGCTCAAACATGTGCCAGACGACAGCACGGACTGCCTGGATGTGAAGAGGCTGGAACAGCCAGAGTGCCTAGCCTGCACCTCCATCTGCATCAGGCTGCTCTTGGAGCCGGAAGAGGTAGAGGATGGGGCGAAGCTTGTGCTCAGGTGCCACCTTCTAGAGGCGTGCTGAGATTCCTGGACCTGAAAGTGCGCTACCTGCACAGCCAGTGGCAGCACTATCACAGATCTGGCGAAGCCGCCGGAACACCCCTTTGGAGGCCAACAAGAAACGTGCCCTTCCGGGAACTGAAGAACCAGAGAACAGCTCAGGGCGCTCCTGGAATCCACCATGCTGCTTCTCCAGTGGCCGCCAACCTGTGTGATCCTGCCAGACATGCCCAGCACACCAGGATTCCTTGTGGCGCTGGACAAGTGCGCGCTGGAAGAGGACCTGAAGCAGGCGGAGGTGTTCTGCAACCTCAAAGACCCGCTCCTGAGAAGCCTGGCTGCCCTTGCAGAAGAGGACAGCCTAGACTGCACACCGTGAAAATGTGGCGAGCCGTGGCCATGATGGTGCCCGATAGACAGGTCCACTACGACTTTGGACTGGGCGTGCCAGGCGATAGCACTCGGAGAGCCGTCAGACGGATGAACACCTTTTACGAAGCCGGGATGACCCTGGGCGAGAAGTTCAGAGTGGGCAACTGCAAGCACCTGAAGATGACCCGGCCTAACAGCAAGATGGCCCTGAATAGCGAGGCCCTGTCTGTGGTGTCTGAATGTGGCGCCTCTGCCTGTGACGTGTCCCTGATCGCTATGGACTCCGCCTTTGTGCAGGGCAAAGACTGGGGCGTGAAGAAGTTCATCCGGCGGGACTTCTACGCCTACAAGGACTTCCTGTGGTGCTTCCCCTTCTCTCTGGTGTTCCTGCAAGAGATCCAGATCTGCTGTCATGTGTCCTGCCTGTGCTGCATCTGCTGTAGCACCAGAATCTGCCTGGGCTGTCTGCTGGAACTGTTCCTGAGCAGAGCCCTGAGAGCACTGCACGTGCTGTGGAACGGATTCCAGCTGCACTGCCAGACCGAGTACAACCAGAAACTGCAAGTGAACCAGTTCAGCGAGAGCAAGAGCCTGTACCACCGGGAAAAGCAGCTCATTGCCATGGACAGCGCCATCTGCGAAGAGAGAGGCGCCGCAGGATCTCTGATCTCCTGCGAAACAATGCCCGCCATCCTGAAGCTGCAGAAGAATTGCCTCCTAAGCCTGCGAACCGCTCTGACACACAACCAGGACTTCAGCATCTACAGACTGTGTTGCAAGCGGGGCTCCCTGTGCCATGCAAGCCAAGCTAGAAGCCCCGCCTTTCCTAAACCTGTGCGACCTCTGCCAGCTCCAATCACCAGAATTACCCCTCAGCTCGGCGGCCAGAGCGATTCATCTCAACCTCTGCTGACCACCGGCAGACCTCAAGGCTGGCAAGACCAAGCTCTGAGACACACCCAGCAGGCTAGCCCTGCCTCTTGTGCCACCATCACAATCCCCATCCACTCTGCCGCTCTGGGCGATCATTCTGGCGATCCTGGACCAGCCTGGGACACATGTCCTCCACTGCCACTCACAACACTGATCCCTAGGGCTCCTCCACCTTACGGCGATTCTACCGCTAGAAGCTGGCCCAGCAGATGTGGACCACTCGGAGGCAACACAACCCTCCAGCAACTGGGAGAAGCCTCTCAGGCTCCTAGCGGCTCTCTGATCCCTCTCAGACTGCCTCTCCTGTGGGAAGTTCGGGGCCAGCCTGATTCTTTTGCCGCACTGCACAGCTCCCTGAACGAGCTGGGAGAGATCGCTAGAGAGCTGCACCAGTTCGCCTTCGACCTGCTGATCAAGAGCCACTTCGTGCAAGGCAAGGATTGGGGCCTCAAAAAGTTTATCCGCAGAGACTTCTGGGGCATGGAACTGGCCGCCAGCAGAAGATTCAGCTGGGATCATCATAGCGCAGGCGGCCCACCTAGAGTGCCATCTGTTAGAAGCGGAGCTGCCCAGGTGCAGCCTAAAGATCCTCTGCCACTGAGAACACTGGCCGGCTGCCTTGCTAGAACAGCCCATCTTAGACCTGGCGCCGAGTCTCTGCCTCAGCCACAACTGCACTGTACCCTGTGGTTCCAGTCCAGCGAGCTGTCTCCTACTGGTGCCCCTTGGCCATCTAGACGCCCTACTTGGAGAGGCACCACCGTGTCACCAAGAACCGCCACAAGCAGCGCCAGAACCTGTTGTGGCACAAAGTGGCCCTCCAGCCAAGAAGCCGCTCTCGGACTTGGAAGCGGACTGCTGAGGTTCTCTTGTGGAACCGCCGCCATTCGGAAGATGCACTTTAGCCTGAAAGAACACCCTCCACCACCTTGTCCTCCAGAGGCTTTCCAAAGAGCTGCTGGCGAAGGCGGACCTGGTAGAGGTGGTGCTAGAAGAGGTGCTAGGGTGCTGCAGAGCCCATTCTGTAGAGCAGGCGCAGGCGAATGGCTGGGCCATCAGAGTCTGAGACATGTCGTCGGCTACGGCCACCTGGATACAAGCGGAAGCAGCTCTAGCTCCAGCTGGCCTAACTCAAAAATGGCTCTGAACAGCCTGAACTCCATCGACGACGCCCAGCTGACAAGAATCGCCCCTCCTAGATCTCACTGCTGCTTTTGGGAAGTGAACGCCCCAAGCCATCACCATCACCACCATTAGTAAAGGCGCGCCTAGCGGCCGCGATCTGCTGTGCCTTCTAGTTGCCAGCCATCTGTTGTTTGCCCCTCCCCCGTGCCTTCCTTGACCCTGGAAGGTGCCACTCCCACTGTCCTTTCCTAATAAAATGAGGAAATTGCATCGCATTGTCTGAGTAGGTGTCATTCTATTCTGGGGGGTGGGGTGGGGCAGGACAGCAAGGGGGAGGATTGGGAAGACAATAGCAGGCATGCTGGGGATGCGGTGGGCTCTATGGCC

SEQ ID NO: 552 - protein, 1507 aa, Artificial sequence
  Heterologous polypeptide
MGQKEQIHTLQKNSERMSKQLTRSSQAVQNLQNGGGSRSSATLPGRRRRRWLRRRRQPISVAPAGPPRRPNQKPNPPGGARCVIMRPTWPGTSAFTGMECTLGQVGAPSPRREEDGWRGGHSRFKADVPAPQGPCWGGQPGSAPSSAPPEQSLLDDYWAQKEKISIPRTHLCWKFEMSYTVGGPPPHVHARPRHWKTDRDYWAQKEKGSSSFLRPSCVPFRELKNVSVLEGLRQGRLGGPCSCHCPRPSQARLTPVDVAGPFLCLGDPGLFPPVKSSITEISCCTLSSEENEYLPRPEWQLQYEAGMTLGGKILFFLFLLLPLSPFSLIFLVLGVLSGHSGSRLKRSFAVTERIITGGKSTCSAPGPQSLPSTPFSTYPQWVILITELDGHSYTSKVNCLLLQDGFHGCVSITGAAGRRNLSIFLFLMLCKLEFHACQWQHYHRSGEAAGTPLWRPTRNVAMMVPDRQVHYDFGLKIQNKNCPDVLRFLDLKVRYLHSVPFRELKNQRTAQGAPGIHHAASPVAANLCDPARHAQHTRIPCGAGQVRAGRGPEAGGGVLQPQRPAPEKPGCPCRRGQPRLHTVKMWRACHLFLQPQVGTPPPHTASARAPSGPPHPHESCPAGRRPARAAQTCARRQHGLPGCEEAGTARVPSLHLHLHQAALGAGRGRGWGEACAQVPPSRGHYKLIQQPISLFSITDRLHKTFSQLPSVHLCSITFQWGHPPIFCSTNDICVTANFCISVTFLKPCFLLHEASASQFKKFDGPCGERGGGRTARALWARGDSVLTPALDPQTPVRAPSLTRAAAAVGVPGDSTRRAVRRMNTFCGASACDVSLIAMDSACEERGAAGSLISCESLYHREKQLIAMDSAIFVQGKDWGVKKFIRRDFTMPAILKLQKNCLLSLNSKMALNSEALSVVSEYEAGMTLGEKFRVGNCKHLKMTRPTEYNQKLQVNQFSESKRTALTHNQDFSIYRLCCKRGSLCHASQARSPAFPKPVRPLPAPITRITPQLGGQSDSSQPLLTTGRPQGWQDQALRHTQQASPASCATITIPIHSAALGDHSGDPGPAWDTCPPLPLTTLIPRAPPPYGDSTARSWPSRCGPLGYAYKDFLWCFPFSLVFLQEIQICCHVSCLCCICCSTRICLGCLLELFLSRALRALHVLWNGFQLHCQGNTTLQQLGEASQAPSGSLIPLRLPLLWEVRGNSKMALNSLNSIDDAQLTRIAPPRSHCCFWEVNAPFVQGKDWGLKKFIRRDFEAFQRAAGEGGPGRGGARRGARVLQSPFCRAGAGEWLGHQSLRWGMELAASRRFSWDHHSAGGPPRVPSVRSGAAQVQPKDPLPLRTLAGCLARTAHLRPGAESLPQPQLHCTIARELHQFAFDLLIKSHKMHFSLKEHPPPPCPPHVVGYGHLDTSGSSSSSSWPQPDSFAALHSSLNELGELWFQSSELSPTGAPWPSRRPTWRGTTVSPRTATSSARTCCGTKWPSSQEAALGLGSGLLRFSCGTAAIR

SEQ ID NO: 553 - DNA, 4722 bp, Artificial sequence
  Heterologous polynucleotide
gatcactaattccaaacccacccgctttttatagtaagtttttcacccataaataataaatacaataattaatttctcgtaaaagtagaaaatatattctaatttattgcacggtaaggaagtagaatcataaagaacagtgacggatcccgcgacttcgccgccatgggccagaaagagcagatccacacactgcagaaaaacagcgagcggatgagcaagcagctgaccagatcttctcaggccgtgcagaacctgcagaacggcggaggctctagaagctctgctacacttcctggcaggcggcggagaagatggctgagaagaaggcggcagcctatctctgtggctcctgctggacctcctagacggcccaaccagaagcctaatcctcctggcggagccagatgcgtgatcatgaggcctacatggcctggcaccagcgcctttaccggcatggaatgtacactgggccaagtgggagccccatctcctagaagagaagaggatggctggcgcggaggccactctagattcaaagctgatgtgcccgctcctcagggcccttgttggggaggacaacctggatctgccccatcttctgccccacctgaacagagcctgctggatgactattgggctcaaaaagagaagatcagcatccccagaacacacctgtgctggaagttcgagatgagctacaccgttggcggccctccaccacatgttcacgccagacctagacactggaaaaccgacagagattattgggcccagaaagaaaagggcagcagcagcttcctgcggcctagctgtgtgcccttccgggaactgaagaacgtgtccgttctggaaggcctgaggcagggcagacttggcggaccttgtagctgccactgtcctagaccaagccaggccagactgacccctgtggatgtggctggcccatttctgtgtctgggcgaccctggactgttccctccagtgaagtctagcatcaccgagatcagctgctgcaccctgagcagcgaggaaaacgagtacctgcctagacctgaatggcagctgcagtacgaggccggcatgacactcggaggcaagatcctgttcttcctgttcctgctgctccctctgagccccttcagcctgatctttctggtgctgggcgtgctgtctggccactctggaagcagactgaagagaagcttcgccgtgaccgagcggatcatcacaggcggcaagagcacatgttctgcccctggacctcagtctctgcccagcacacccttcagcacataccctcagtgggtcatcctgatcaccgagctggatggccacagctacaccagcaaagtgaactgcctcctgctgcaggatggcttccacggctgtgtgtctattactggcgccgctggcagacggaacctgagcatctttctgtttctgatgctgtgcaagctcgagttccacgcctgccaatggcagcactaccacagatctggcgaagccgctggaaccccactttggaggcctaccagaaacgtggccatgatggtgcccgacagacaggtgcactacgacttcggcctgaagatccagaacaagaactgccccgacgtgctgcggttcctggatctcaaagtgcgctacctgcacagcgtgcccttcagagagctgaaaaaccagagaacagcccagggcgctcctggaatccatcatgctgcttctccagtggccgccaatctgtgcgatcctgccagacatgcccagcataccaggattccttgtggcgctggacaagtgcgcgctggaagaggacctgaagctggtggcggagttctgcagcctcaaagacctgctcctgagaagcctggctgcccctgtagaagaggacagcctagactgcacaccgtgaagatgtggcgggcctgccacttgtttctccagccacaagtgggcacccctccacctcatacagcctctgctagagcacctagcggcccacctcatcctcacgaatcttgtcctgccggaagaaggcctgccagagccgctcaaacatgtgccagacgacagcacggactgcccggatgtgaagaagccggaacagccagagtgcctagcctgcaccttcatctgcatcaggccgctcttggagccggaagaggtagaggatggggagaagcttgtgcccaggtgccaccttctagaggccactacaagctgatccagcagccaatcagcctgttctccatcaccgaccggctgcacaagacattcagccagctgccttccgtgcatctgtgcagcatcaccttccagtggggacaccctcctatcttttgctccaccaacgacatctgcgtgaccgccaacttctgtatcagcgtgaccttcctgaagccttgctttctgctgcacgaggcctccgccagccagtttaagaagtttgacggcccctgcggcgagagaggcggaggaagaactgcaagagccctttgggccagaggcgactctgttctgacaccagctctggaccctcagacacctgttagggcccctagcctgacaagagctgccgctgctgttggagtgcctggcgattctactagaagggccgtgcggcggatgaacaccttttgtggcgcatctgcctgcgacgtgtccctgatcgctatggatagcgcctgcgaggaaagaggcgcagccggatctctgatctcttgcgagagcctgtaccaccgggaaaagcagctcattgccatggacagcgccatcttcgtgcagggcaaagactggggcgtgaagaagttcatccggcgggactttaccatgcctgccattctgaagctgcagaagaattgtcttctaagcctgaacagcaagatggccctgaatagcgaggccctgtctgtggtgtccgagtatgaggctggaatgaccctgggcgagaagttcagagtgggcaactgcaagcacctgaagatgacccggcctaccgagtacaaccagaaactgcaagtgaaccagttcagcgagagcaagcggaccgctctgacccacaaccaggacttcagcatctaccggctgtgctgcaagaggggctctctgtgtcatgctagccaggctagaagccccgcctttcctaagcctgtcagacctctgcctgctcctatcaccagaatcacccctcagctcggcggccagtctgattcatctcagccactgctgaccaccggcagacctcaaggatggcaagaccaggctctgagacacacacagcaggctagcccagcctcttgcgccaccatcacaataccaatacattctgccgctctgggcgatcacagcggagatcctggacctgcctgggatacttgtcctcctctgcccctaactacactgatccctagggctcctccaccttacggcgatagcacagccagatcctggcctagcagatgtggccctctgggctacgcctacaaggacttcctgtggtgcttccccttctctctggtgttcctgcaagaaatccagatctgctgtcacgtgtcctgcctgtgctgtatctgctgtagcacccggatctgtctgggctgtctgctggaactgttcctgagcagagccctgagagcactgcacgtgctgtggaacggattccagctgcactgccagggcaacaccacactgcaacagctgggagaagcctctcaggccccaagcggttctctgatccctctcagactgcccctcctgtgggaagtgcggggcaattctaagatggctctcaacagcctgaactccatcgacgacgcccagctgacaagaatcgcccctccaagaagccactgttgcttttgggaagtgaacgccccttttgtgcagggtaaagattggggcctcaaaaagtttatcagacgggacttcgaggctttccagagagcagctggcgaaggcggacctggcagaggtggtgctagaagaggtgctagagtgctgcagagcccattctgtagagctggcgctggcgaatggctgggccaccaatctcttagatggggaatggaactggccgctagcaggcggtttagctgggatcatcattctgccggcggacctccaagagtgccaagcgttagaagcggagcagcccaggtccagcctaaagatccactgccactgagaacactggccggctgccttgccagaacagctcatcttagacctggcgccgaaagcctgcctcaacctcagctgcattgcacaatcgccagagaactgcaccagttcgccttcgacctgctgatcaagagccacaagatgcacttctcactgaaagagcacccgccaccgccgtgcccaccgcacgttgtcggctatggccacctggatacaagcggctcctctagcagtagctcctggcctcagcctgacagctttgctgccctgcatagctccctgaatgagctgggcgaactgtggttccagtccagcgaactgtctcctactggcgctccatggccaagcagaaggcctacttggagaggcaccaccgtgtctccaagaaccgctacaagcagcgccagaacctgttgcggcacaaaatggccctccagccaagaagctgccctcggacttggaagcggactgctgagattcagctgtggcacagccgccatcagaagccatcaccatcaccaccattagtaaaggcgcgcc

SEQ ID NO: 554 - protein, 1507 aa, Artificial sequence
  Heterologous polypeptide
MGQKEQIHTLQKNSERMSKQLTRSSQAVQNLQNGGGSRSSATLPGRRRRRWLRRRRQPISVAPAGPPRRPNQKPNPPGGARCVIMRPTWPGTSAFTKRSFAVTERIILVLGVLSGHSGSRLYEAGMTLGGKILFFLFLLLPLSPFSLIFTEISCCTLSSEENEYLPRPEWQLQVPFRELKNVSVLEGLRQGRLGGPCSCHCPRPSQARLTPVDVAGPFLCLGDPGLFPPVKSSITGGKSTCSAPGPQSLPSTPFSTYPQWVILITELGMECTLGQVGAPSPRREEDGWRGGHSRFKADVPAPQGPCWGGQPGSAPSSAPPEQSLLDDYWAQKEKGSSSFLRPSCDYWAQKEKISIPRTHLCWKFEMSYTVGGPPPHVHARPRHWKTDRGVPGDSTRRAVRRMNTFYEAGMTLGEKFRVGNCKHLKMTRPNSKMALNSEALSVVSECGASACDVSLIAMDSAFVQGKDWGVKKFIRRDFYAYKDFLWCFPFSLVFLQEIQICCHVSCLCCICCSTRICLGCLLELFLSRALRALHVLWNGFQLHCQTEYNQKLQVNQFSESKSLYHREKQLIAMDSAICEERGAAGSLISCETMPAILKLQKNCLLSLRTALTHNQDFSIYRLCCKRGSLCHASQARSPAFPKPVRPLPAPITRITPQLGGQSDSSQPLLTTGRPQGWQDQALRHTQQASPASCATITIPIHSAALGDHSGDPGPAWDTCPPLPLTTLIPRAPPPYGDSTARSWPSRCGPLGDGHSYTSKVNCLLLQDGFHGCVSITGAAGRRNLSIFLFLMLCKLEFHACKIQNKNCPDFKKFDGPCGERGGGRTARALWARGDSVLTPALDPQTPVRAPSLTRAAAAVHYKLIQQPISLFSITDRLHKTFSQLPSVHLCSITFQWGHPPIFCSTNDICVTANFCISVTFLKPCFLLHEASASQCHLFLQPQVGTPPPHTASARAPSGPPHPHESCPAGRRPARAAQTCARRQHGLPGCEEAGTARVPSLHLHLHQAALGAGRGRGWGEACAQVPPSRGVLRFLDLKVRYLHSQWQHYHRSGEAAGTPLWRPTRNVPFRELKNQRTAQGAPGIHHAASPVAANLCDPARHAQHTRIPCGAGQVRAGRGPEAGGGVLQPQRPAPEKPGCPCRRGQPRLHTVKMWRAVAMMVPDRQVHYDFGLGNTTLQQLGEASQAPSGSLIPLRLPLLWEVRGQPDSFAALHSSLNELGEIARELHQFAFDLLIKSHFVQGKDWGLKKFIRRDFWGMELAASRRFSWDHHSAGGPPRVPSVRSGAAQVQPKDPLPLRTLAGCLARTAHLRPGAESLPQPQLHCTLWFQSSELSPTGAPWPSRRPTWRGTTVSPRTATSSARTCCGTKWPSSQEAALGLGSGLLRFSCGTAAIRKMHFSLKEHPPPPCPPEAFQRAAGEGGPGRGGARRGARVLQSPFCRAGAGEWLGHQSLRHVVGYGHLDTSGSSSSSSWPNSKMALNSLNSIDDAQLTRIAPPRSHCCFWEVNAP

SEQ ID NO: 555 - protein, 1507 aa, Artificial sequence
  Heterologous polypeptide
MGQKEQIHTLQKNSERMSKQLTRSSQAVQNLQNGGGSRSSATLPGRRRRRWLRRRRQPISVAPAGPPRRPNQKPNPPGGARCVIMRPTWPGTSAFTKRSFAVTERIITEISCCTLSSEENEYLPRPEWQLQYEAGMTLGGKILFFLFLLLPLSPFSLIFDYWAQKEKGSSSFLRPSCVPFRELKNVSVLEGLRQGRLGGPCSCHCPRPSQARLTPVDVAGPFLCLGDPGLFPPVKSSITGGKSTCSAPGPQSLPSTPFSTYPQWVILITELGMECTLGQVGAPSPRREEDGWRGGHSRFKADVPAPQGPCWGGQPGSAPSSAPPEQSLLDDYWAQKEKISIPRTHLCLVLGVLSGHSGSRLWKFEMSYTVGGPPPHVHARPRHWKTDRDGHSYTSKVNCLLLQDGFHGCVSITGAAGRRNLSIFLFLMLCKLEFHACKIQNKNCPDFKKFDGPCGERGGGRTARALWARGDSVLTPALDPQTPVRAPSLTRAAAAVHYKLIQQPISLFSITDRLHKTFSQLPSVHLCSITFQWGHPPIFCSTNDICVTANFCISVTFLKPCFLLHEASASQCHLFLQPQVGTPPPHTASARAPSGPPHPHESCPAGRRPARAAQTCARRQHGLPGCEEAGTARVPSLHLHLHQAALGAGRGRGWGEACAQVPPSRGVLRFLDLKVRYLHSQWQHYHRSGEAAGTPLWRPTRNVPFRELKNQRTAQGAPGIHHAASPVAANLCDPARHAQHTRIPCGAGQVRAGRGPEAGGGVLQPQRPAPEKPGCPCRRGQPRLHTVKMWRAVAMMVPDRQVHYDFGLGVPGDSTRRAVRRMNTFYEAGMTLGEKFRVGNCKHLKMTRPNSKMALNSEALSVVSECGASACDVSLIAMDSAFVQGKDWGVKKFIRRDFYAYKDFLWCFPFSLVFLQEIQICCHVSCLCCICCSTRICLGCLLELFLSRALRALHVLWNGFQLHCQTEYNQKLQVNQFSESKSLYHREKQLIAMDSAICEERGAAGSLISCETMPAILKLQKNCLLSLRTALTHNQDFSIYRLCCKRGSLCHASQARSPAFPKPVRPLPAPITRITPQLGGQSDSSQPLLTTGRPQGWQDQALRHTQQASPASCATITIPIHSAALGDHSGDPGPAWDTCPPLPLTTLIPRAPPPYGDSTARSWPSRCGPLGGNTTLQQLGEASQAPSGSLIPLRLPLLWEVRGQPDSFAALHSSLNELGEIARELHQFAFDLLIKSHFVQGKDWGLKKFIRRDFWGMELAASRRFSWDHHSAGGPPRVPSVRSGAAQVQPKDPLPLRTLAGCLARTAHLRPGAESLPQPQLHCTLWFQSSELSPTGAPWPSRRPTWRGTTVSPRTATSSARTCCGTKWPSSQEAALGLGSGLLRFSCGTAAIRKMHFSLKEHPPPPCPPEAFQRAAGEGGPGRGGARRGARVLQSPFCRAGAGEWLGHQSLRHVVGYGHLDTSGSSSSSSWPNSKMALNSLNSIDDAQLTRIAPPRSHCCFWEVNAP

SEQ ID NO: 556 - protein, 1507 aa, Artificial sequence
  Heterologous polypeptide
MGQKEQIHTLQKNSERMSKQLTRSSQAVQNLQNGGGSRSSATLPGRRRRRWLRRRRQPISVAPAGPPRRPNQKPNPPGGARCVIMRPTWPGTSAFTKRSFAVTERIIDYWAQKEKGSSSFLRPSCVPFRELKNVSVLEGLRQGRLGGPCSCHCPRPSQARLTPVDVAGPFLCLGDPGLFPPVKSSILVLGVLSGHSGSRLYEAGMTLGGKILFFLFLLLPLSPFSLIFTEISCCTLSSEENEYLPRPEWQLQTGGKSTCSAPGPQSLPSTPFSTYPQWVILITELGMECTLGQVGAPSPRREEDGWRGGHSRFKADVPAPQGPCWGGQPGSAPSSAPPEQSLLDDYWAQKEKISIPRTHLCWKFEMSYTVGGPPPHVHARPRHWKTDRDGHSYTSKVNCLLLQDGFHGCVSITGAAGRRNLSIFLFLMLCKLEFHACKIQNKNCPDFKKFDGPCGERGGGRTARALWARGDSVLTPALDPQTPVRAPSLTRAAAAVHYKLIQQPISLFSITDRLHKTFSQLPSVHLCSITFQWGHPPIFCSTNDICVTANFCISVTFLKPCFLLHEASASQCHLFLQPQVGTPPPHTASARAPSGPPHPHESCPAGRRPARAAQTCARRQHGLPGCEEAGTARVPSLHLHLHQAALGAGRGRGWGEACAQVPPSRGVLRFLDLKVRYLHSQWQHYHRSGEAAGTPLWRPTRNVPFRELKNQRTAQGAPGIHHAASPVAANLCDPARHAQHTRIPCGAGQVRAGRGPEAGGGVLQPQRPAPEKPGCPCRRGQPRLHTVKMWRAVAMMVPDRQVHYDFGLGVPGDSTRRAVRRMNTFYEAGMTLGEKFRVGNCKHLKMTRPNSKMALNSEALSVVSECGASACDVSLIAMDSAFVQGKDWGVKKFIRRDFYAYKDFLWCFPFSLVFLQEIQICCHVSCLCCICCSTRICLGCLLELFLSRALRALHVLWNGFQLHCQTEYNQKLQVNQFSESKSLYHREKQLIAMDSAICEERGAAGSLISCETMPAILKLQKNCLLSLRTALTHNQDFSIYRLCCKRGSLCHASQARSPAFPKPVRPLPAPITRITPQLGGQSDSSQPLLTTGRPQGWQDQALRHTQQASPASCATITIPIHSAALGDHSGDPGPAWDTCPPLPLTTLIPRAPPPYGDSTARSWPSRCGPLGGNTTLQQLGEASQAPSGSLIPLRLPLLWEVRGQPDSFAALHSSLNELGEIARELHQFAFDLLIKSHFVQGKDWGLKKFIRRDFWGMELAASRRFSWDHHSAGGPPRVPSVRSGAAQVQPKDPLPLRTLAGCLARTAHLRPGAESLPQPQLHCTLWFQSSELSPTGAPWPSRRPTWRGTTVSPRTATSSARTCCGTKWPSSQEAALGLGSGLLRFSCGTAAIRKMHFSLKEHPPPPCPPEAFQRAAGEGGPGRGGARRGARVLQSPFCRAGAGEWLGHQSLRHVVGYGHLDTSGSSSSSSWPNSKMALNSLNSIDDAQLTRIAPPRSHCCFWEVNAP

SEQ ID NO: 557 - protein, 1507 aa, Artificial sequence
  Heterologous polypeptide
MGQKEQIHTLQKNSERMSKQLTRSSQAVQNLQNGGGSRSSATLPGRRRRRWLRRRRQPISVAPAGPPRRPNQKPNPPGGARCVIMRPTWPGTSAFTGMECTLGQVGAPSPRREEDGWRGGHSRFKADVPAPQGPCWGGQPGSAPSSAPPEQSLLDDYWAQKEKISIPRTHLCWKFEMSYTVGGPPPHVHARPRHWKTDRDYWAQKEKGSSSFLRPSCVPFRELKNVSVLEGLRQGRLGGPCSCHCPRPSQARLTPVDVAGPFLCLGDPGLFPPVKSSITEISCCTLSSEENEYLPRPEWQLQYEAGMTLGGKILFFLFLLLPLSPFSLIFLVLGVLSGHSGSRLKRSFAVTERIITGGKSTCSAPGPQSLPSTPFSTYPQWVILITELDGHSYTSKVNCLLLQDGFHGCVSITGAAGRRNLSIFLFLMLCKLEFHACCHLFLQPQVGTPPPHTASARAPSGPPHPHESCPAGRRPARAAQTCARRQHGLPGCEEAGTARVPSLHLHLHQAALGAGRGRGWGEACAQVPPSRGHYKLIQQPISLFSITDRLHKTFSQLPSVHLCSITFQWGHPPIFCSTNDICVTANFCISVTFLKPCFLLHEASASQVAMMVPDRQVHYDFGLKIQNKNCPDVLRFLDLKVRYLHSVPFRELKNQRTAQGAPGIHHAASPVAANLCDPARHAQHTRIPCGAGQVRAGRGPEAGGGVLQPQRPAPEKPGCPCRRGQPRLHTVKMWRAQWQHYHRSGEAAGTPLWRPTRNFKKFDGPCGERGGGRTARALWARGDSVLTPALDPQTPVRAPSLTRAAAAVGVPGDSTRRAVRRMNTFCGASACDVSLIAMDSACEERGAAGSLISCESLYHREKQLIAMDSAIFVQGKDWGVKKFIRRDFTMPAILKLQKNCLLSLNSKMALNSEALSVVSEYEAGMTLGEKFRVGNCKHLKMTRPTEYNQKLQVNQFSESKRTALTHNQDFSIYRLCCKRGSLCHASQARSPAFPKPVRPLPAPITRITPQLGGQSDSSQPLLTTGRPQGWQDQALRHTQQASPASCATITIPIHSAALGDHSGDPGPAWDTCPPLPLTTLIPRAPPPYGDSTARSWPSRCGPLGYAYKDFLWCFPFSLVFLQEIQICCHVSCLCCICCSTRICLGCLLELFLSRALRALHVLWNGFQLHCQGNTTLQQLGEASQAPSGSLIPLRLPLLWEVRGNSKMALNSLNSIDDAQLTRIAPPRSHCCFWEVNAPFVQGKDWGLKKFIRRDFEAFQRAAGEGGPGRGGARRGARVLQSPFCRAGAGEWLGHQSLRWGMELAASRRFSWDHHSAGGPPRVPSVRSGAAQVQPKDPLPLRTLAGCLARTAHLRPGAESLPQPQLHCTIARELHQFAFDLLIKSHKMHFSLKEHPPPPCPPHVVGYGHLDTSGSSSSSSWPQPDSFAALHSSLNELGELWFQSSELSPTGAPWPSRRPTWRGTTVSPRTATSSARTCCGTKWPSSQEAALGLGSGLLRFSCGTAAIR

SEQ ID NO: 558 - protein, 1507 aa, Artificial sequence
  Heterologous polypeptide
MGQKEQIHTLQKNSERMSKQLTRSSQAVDGHSYTSKVNCLLLQDGFHGCVSITGAAGRRNLSIFLFLMLCKLEFHACQWQHYHRSGEAAGTPLWRPTRNVAMMVPDRQVHYDFGLVLRFLDLKVRYLHSKIQNKNCPDVPFRELKNQRTAQGAPGIHHAASPVAANLCDPARHAQHTRIPCGAGQVRAGRGPEAGGGVLQPQRPAPEKPGCPCRRGQPRLHTVKMWRACHLFLQPQVGTPPPHTASARAPSGPPHPHESCPAGRRPARAAQTCARRQHGLPGCEEAGTARVPSLHLHLHQAALGAGRGRGWGEACAQVPPSRGHYKLIQQPISLFSITDRLHKTFSQLPSVHLCSITFQWGHPPIFCSTNDICVTANFCISVTFLKPCFLLHEASASQFKKFDGPCGERGGGRTARALWARGDSVLTPALDPQTPVRAPSLTRAAAAVQNLQNGGGSRSSATLPGRRRRRWLRRRRQPISVAPAGPPRRPNQKPNPPGGARCVIMRPTWPGTSAFTGMECTLGQVGAPSPRREEDGWRGGHSRFKADVPAPQGPCWGGQPGSAPSSAPPEQSLLDDYWAQKEKISIPRTHLCWKFEMSYTVGGPPPHVHARPRHWKTDRDYWAQKEKGSSSFLRPSCVPFRELKNVSVLEGLRQGRLGGPCSCHCPRPSQARLTPVDVAGPFLCLGDPGLFPPVKSSITEISCCTLSSEENEYLPRPEWQLQYEAGMTLGGKILFFLFLLLPLSPFSLIFLVLGVLSGHSGSRLKRSFAVTERIITGGKSTCSAPGPQSLPSTPFSTYPQWVILITELGVPGDSTRRAVRRMNTFCGASACDVSLIAMDSACEERGAAGSLISCESLYHREKQLIAMDSAIFVQGKDWGVKKFIRRDFTMPAILKLQKNCLLSLNSKMALNSEALSVVSEYEAGMTLGEKFRVGNCKHLKMTRPTEYNQKLQVNQFSESKRTALTHNQDFSIYRLCCKRGSLCHASQARSPAFPKPVRPLPAPITRITPQLGGQSDSSQPLLTTGRPQGWQDQALRHTQQASPASCATITIPIHSAALGDHSGDPGPAWDTCPPLPLTTLIPRAPPPYGDSTARSWPSRCGPLGYAYKDFLWCFPFSLVFLQEIQICCHVSCLCCICCSTRICLGCLLELFLSRALRALHVLWNGFQLHCQGNTTLQQLGEASQAPSGSLIPLRLPLLWEVRGNSKMALNSLNSIDDAQLTRIAPPRSHCCFWEVNAPFVQGKDWGLKKFIRRDFEAFQRAAGEGGPGRGGARRGARVLQSPFCRAGAGEWLGHQSLRWGMELAASRRFSWDHHSAGGPPRVPSVRSGAAQVQPKDPLPLRTLAGCLARTAHLRPGAESLPQPQLHCTIARELHQFAFDLLIKSHKMHFSLKEHPPPPCPPHVVGYGHLDTSGSSSSSSWPQPDSFAALHSSLNELGELWFQSSELSPTGAPWPSRRPTWRGTTVSPRTATSSARTCCGTKWPSSQEAALGLGSGLLRFSCGTAAIR

SEQ ID NO: 559 - protein, 1507 aa, Artificial sequence
  Heterologous polypeptide
MGQKEQIHTLQKNSERMSKQLTRSSQAVGNTTLQQLGEASQAPSGSLIPLRLPLLWEVRGNSKMALNSLNSIDDAQLTRIAPPRSHCCFWEVNAPFVQGKDWGLKKFIRRDFEAFQRAAGEGGPGRGGARRGARVLQSPFCRAGAGEWLGHQSLRWGMELAASRRFSWDHHSAGGPPRVPSVRSGAAQVQPKDPLPLRTLAGCLARTAHLRPGAESLPQPQLHCTIARELHQFAFDLLIKSHKMHFSLKEHPPPPCPPHVVGYGHLDTSGSSSSSSWPQPDSFAALHSSLNELGELWFQSSELSPTGAPWPSRRPTWRGTTVSPRTATSSARTCCGTKWPSSQEAALGLGSGLLRFSCGTAAIRDGHSYTSKVNCLLLQDGFHGCVSITGAAGRRNLSIFLFLMLCKLEFHACQWQHYHRSGEAAGTPLWRPTRNVAMMVPDRQVHYDFGLKIQNKNCPDVLRFLDLKVRYLHSVPFRELKNQRTAQGAPGIHHAASPVAANLCDPARHAQHTRIPCGAGQVRAGRGPEAGGGVLQPQRPAPEKPGCPCRRGQPRLHTVKMWRACHLFLQPQVGTPPPHTASARAPSGPPHPHESCPAGRRPARAAQTCARRQHGLPGCEEAGTARVPSLHLHLHQAALGAGRGRGWGEACAQVPPSRGHYKLIQQPISLFSITDRLHKTFSQLPSVHLCSITFQWGHPPIFCSTNDICVTANFCISVTFLKPCFLLHEASASQFKKFDGPCGERGGGRTARALWARGDSVLTPALDPQTPVRAPSLTRAAAAVGVPGDSTRRAVRRMNTFCGASACDVSLIAMDSATEYNQKLQVNQFSESKYEAGMTLGEKFRVGNCKHLKMTRPTMPAILKLQKNCLLSLNSKMALNSEALSVVSECEERGAAGSLISCESLYHREKQLIAMDSAIFVQGKDWGVKKFIRRDFRTALTHNQDFSIYRLCCKRGSLCHASQARSPAFPKPVRPLPAPITRITPQLGGQSDSSQPLLTTGRPQGWQDQALRHTQQASPASCATITIPIHSAALGDHSGDPGPAWDTCPPLPLTTLIPRAPPPYGDSTARSWPSRCGPLGYAYKDFLWCFPFSLVFLQEIQICCHVSCLCCICCSTRICLGCLLELFLSRALRALHVLWNGFQLHCQQNLQNGGGSRSSATLPGRRRRRWLRRRRQPISVAPAGPPRRPNQKPNPPGGARCVIMRPTWPGTSAFTGMECTLGQVGAPSPRREEDGWRGGHSRFKADVPAPQGPCWGGQPGSAPSSAPPEQSLLDDYWAQKEKISIPRTHLCWKFEMSYTVGGPPPHVHARPRHWKTDRDYWAQKEKGSSSFLRPSCVPFRELKNVSVLEGLRQGRLGGPCSCHCPRPSQARLTPVDVAGPFLCLGDPGLFPPVKSSITEISCCTLSSEENEYLPRPEWQLQYEAGMTLGGKILFFLFLLLPLSPFSLIFLVLGVLSGHSGSRLKRSFAVTERIITGGKSTCSAPGPQSLPSTPFSTYPQWVILITEL

SEQ ID NO: 560 - protein, 15 aa, Homo sapiens
WKFEMSYTVGGPPPH

SEQ ID NO: 561 - protein, 15 aa, Homo sapiens
VGGPPPHVHARPRHW

SEQ ID NO: 562 - protein, 14 aa, Homo sapiens
PPHVHARPRHWKTD

SEQ ID NO: 563 - protein, 15 aa, Homo sapiens
YEAGMTLGGKILFFL

SEQ ID NO: 564 - protein, 15 aa, Homo sapiens
GKILFFLFLLLPLSP

SEQ ID NO: 565 - protein, 16 aa, Homo sapiens
FFLFLLLPLSPFSLIF

SEQ ID NO: 566 - protein, 15 aa, Homo sapiens
DGHSYTSKVNCLLLQ

SEQ ID NO: 567 - protein, 15 aa, Homo sapiens
VNCLLLQDGFHGCVS

SEQ ID NO: 568 - protein, 15 aa, Homo sapiens
GFHGCVSITGAAGRR

SEQ ID NO: 569 - protein, 15 aa, Homo sapiens
TGAAGRRNLSIFLFL

SEQ ID NO: 570 - protein, 15 aa, Homo sapiens
LSIFLFLMLCKLEFH

SEQ ID NO: 571 - protein, 13 aa, Homo sapiens
LFLMLCKLEFHAC

SEQ ID NO: 572 - protein, 15 aa, Homo sapiens
TGGKSTCSAPGPQSL

SEQ ID NO: 573 - protein, 15 aa, Homo sapiens
APGPQSLPSTPFSTY

SEQ ID NO: 574 - protein, 15 aa, Homo sapiens
STPFSTYPQWVILIT

SEQ ID NO: 575 - protein, 15 aa, Homo sapiens
SRSSATLPGRRRRRW

SEQ ID NO: 576 - protein, 15 aa, Homo sapiens
DYWAQKEKGSSSFLR

SEQ ID NO: 577 - protein, 14 aa, Homo sapiens
QKEKGSSSFLRPSC

SEQ ID NO: 578 - protein, 15 aa, Homo sapiens
VPFRELKNVSVLEGL

SEQ ID NO: 579 - protein, 15 aa, Homo sapiens
VSVLEGLRQGRLGGP

SEQ ID NO: 580 - protein, 15 aa, Homo sapiens
QGRLGGPCSCHCPRP

SEQ ID NO: 581 - protein, 15 aa, Homo sapiens
SCHCPRPSQARLTPV

SEQ ID NO: 582 - protein, 15 aa, Homo sapiens
QARLTPVDVAGPFLC

SEQ ID NO: 583 - protein, 15 aa, Homo sapiens
VAGPFLCLGDPGLFP

SEQ ID NO: 584 - protein, 13 aa, Homo sapiens
GDPGLFPPVKSSI

SEQ ID NO: 585 - protein, 15 aa, Homo sapiens
GMECTLGQVGAPSPR

SEQ ID NO: 586 - protein, 15 aa, Homo sapiens
VGAPSPRREEDGWRG

SEQ ID NO: 587 - protein, 15 aa, Homo sapiens
EEDGWRGGHSRFKAD

SEQ ID NO: 588 - protein, 15 aa, Homo sapiens
HSRFKADVPAPQGPC

SEQ ID NO: 589 - protein, 15 aa, Homo sapiens
PAPQGPCWGGQPGSA

SEQ ID NO: 590 - protein, 15 aa, Homo sapiens
GGQPGSAPSSAPPEQ

SEQ ID NO: 591 - protein, 15 aa, Homo sapiens
GSAPSSAPPEQSLLD

SEQ ID NO: 592 - protein, 15 aa, Homo sapiens
GNTTLQQLGEASQAP

SEQ ID NO: 593 - protein, 15 aa, Homo sapiens
GEASQAPSGSLIPLR

SEQ ID NO: 594 - protein, 16 aa, Homo sapiens
GSLIPLRLPLLWEVRG

SEQ ID NO: 595 - protein, 15 aa, Homo sapiens
EAFQRAAGEGGPGRG

SEQ ID NO: 596 - protein, 15 aa, Homo sapiens
EGGPGRGGARRGARV

SEQ ID NO: 597 - protein, 15 aa, Homo sapiens
ARRGARVLQSPFCRA

SEQ ID NO: 598 - protein, 15 aa, Homo sapiens
QSPFCRAGAGEWLGH

SEQ ID NO: 599 - protein, 15 aa, Homo sapiens
CRAGAGEWLGHQSLR

SEQ ID NO: 600 - protein, 15 aa, Homo sapiens
DYWAQKEKISIPRTH

SEQ ID NO: 601 - protein, 13 aa, Homo sapiens
QKEKISIPRTHLC

SEQ ID NO: 602 - protein, 15 aa, Homo sapiens
VAMMVPDRQVHYDFG

SEQ ID NO: 603 - protein, 13 aa, Homo sapiens
VPDRQVHYDFGLR

SEQ ID NO: 604 - protein, 15 aa, Homo sapiens
FKKFDGPCGERGGGR

SEQ ID NO: 605 - protein, 15 aa, Homo sapiens
GERGGGRTARALWAR

SEQ ID NO: 606 - protein, 15 aa, Homo sapiens
ARALWARGDSVLTPA

SEQ ID NO: 607 - protein, 15 aa, Homo sapiens
DSVLTPALDPQTPVR

SEQ ID NO: 608 - protein, 15 aa, Homo sapiens
DPQTPVRAPSLTRAA

SEQ ID NO: 609 - protein, 14 aa, Homo sapiens
PVRAPSLTRAAAAV

SEQ ID NO: 610 - protein, 15 aa, Homo sapiens
GRRRRRWLRRRRQPI

SEQ ID NO: 611 - protein, 15 aa, Homo sapiens
GVPGDSTRRAVRRMN

SEQ ID NO: 612 - protein, 13 aa, Homo sapiens
DSTRRAVRRMNTF

SEQ ID NO: 613 - protein, 15 aa, Homo sapiens
RRRRQPISVAPAGPP

SEQ ID NO: 614 - protein, 15 aa, Homo sapiens
VAPAGPPRRPNQKPN

SEQ ID NO: 615 - protein, 15 aa, Homo sapiens
TEISCCTLSSEENEY

SEQ ID NO: 616 - protein, 16 aa, Homo sapiens
SSEENEYLPRPEWQLQ

SEQ ID NO: 617 - protein, 15 aa, Homo sapiens
RPNQKPNPPGGARCV

SEQ ID NO: 618 - protein, 15 aa, Homo sapiens
PGGARCVIMRPTWPG

SEQ ID NO: 619 - protein, 15 aa, Homo sapiens
HVVGYGHLDTSGSSS

SEQ ID NO: 620 - protein, 16 aa, Homo sapiens
YGHLDTSGSSSSSSWP

SEQ ID NO: 621 - protein, 12 aa, Homo sapiens
MRPTWPGTSAFT

SEQ ID NO: 622 - DNA, 32363 bp, Artificial sequence
  GAd20
catcatcaataatataccttattttggattgaggccaatatgataatgaggtgggcggggcgaggcggggcgggtgacgtaggacgcgcgagtagggttgggaggtgtggcggaagtgtggcatttgcaagtgggaggagctgacatgcaatcttccgtcgcggaaaatgtgacgtttttgatgagcgccgcctacctccggaagtgccaattttcgcgcgcttttcaccggatatcgtagtaattttgggcgggaccatgtaagatttggccattttcgcgcgaaaagtgaaacggggaagtgaaaactgaataatagggcgttagtcatagcgcgtaatatttaccgagggccgagggactttgaccgattacgtggaggactcgcccaggtgttttttacgtgaatttccgcgttccgggtcaaagtctccgtttttattgtcgccgtcatctgacgcggagggtatttaaacccgctgcgctcctaaagaggccactcttgagtgccagcgagaagagttttctcctccgctccgtttcggcgatcgaaaaatgagacatttagcctgcactccgggtcttttgtccggccgggcggcgtccgagcttttggacgctttgctcaatgaggttctgagcgatgattttccgtctactacccactttagcccacctactcttcacgaactgtacgatctggatgtactggtggatgtgaacgatcccaacgaggaggcggtttctacgttttttcccgagtctgcgcttttggctgcccaggagggatttgacctacacactccgccgctgcctattttagagtctccgctgccggagcccagtggtataccttatatgcctgaactgcttcccgaagtggtagacctgacctgccacgagccgggctttccgcccagcgacgatgagggtgagccttttgctttagactatgctgagatacctgggctcggttgcaggtcttgtgcatatcatcagagggttaccggagaccccgaggttaagtgttcgctgtgctatatgaggctgacctcttcctttatctacagtaagtttttttgtgtaggtgggctttttgggtaggtgggttttgtggcaggacaggtgtaaatgttgcttgtgttttttgtacctgcaggtccggtgtccgagccagacccggagcccgaccgcgatcccgagccggatcccgagcctcctcgcaggccaaggaaattaccttccattttgtgcaagcctaagacacctgtgaggaccagcgaggcggacagcactgactctggcacttctacctctcctcctgaaattcacccagtggttcctctgggtatacatagacctgttgctgttagagtttgcgggcgacgccctgcagtagagtgcattgaggacttgcttaacgatcccgagggacctttggacttgagcattaaacgccctaggcaataaaccccacctaagtaataaaccccacctaagtaataaactttaccgcccttggttattgagatgacgcccaatgtttgcttttgaatgacttcatgtgtataataaaagtgagtgtggtcataggtctcttgtttgtctgggcggggtttaagggtatataagtttctcggggctaaacttggttacacttgaccccaatggaggcgtgggggtgcttggaggagtttgcggacgtgcgccgtttgctggacgagagctctagcaatacctatagtatttggaggtatctgtggggctctactcaggccaagttggtcttcagaattaagcaggattacaagtgcgattttgaagagctttttagttcctgtggtgagcttttgcaatccttgaatctgggccaccaggctatcttccaggaaaaggttctctcgactttggatttttccactcccgggcgcaccgccgcttgtgtggcttttgtgtcttttgtgcaagataaatggagcggggagacccacctgagtcacggctacgtgctggatttcatggcgatggctctttggagggcttacaacaaatggaagattcagaaggaactgtacggttccgccctacgtcgtccacttctgcagcggcaggggctgatgtttcccgaccatcgccagcatcagaatctggaagacgagcgagcggagaagatcagcttgagagccggcctggaccctcctcaggaggaatgaatctcccgcaggtggttgagctgtttcccgaactgagacgggtcctgactatcagggaggatggtcagtttgtgaagaagctgaagagggatcggggtgagggagatgatgaggcggctagcaatttagcttttagtctgataactcgccaccgaccggaatgtattacctatcagcagattaaggagagttgtgccaacgagctggatcttttgggtcagaagtatagcatagaacagcttaccacttactggcttcagcccggggatgattgggaagaggcgattagggtgtatgcaaaggtggccctgcggcccgattgcaagtataagattactaagttggttaatattagaaactgctgctatatttctggaaacggggccgaagtggagatagatactgaggacagggtggctattaggtgttgcatgataaacatgtggcccgggatactggggatggatggggtgatatttatgaatgtgaggttcacgggccccaactttaatggtacggtgttcatgggcaacaccaacttgctcctgcatggtgcgagtttctatgggtttaacaacacctgtatagaggcctggaccgatgtaaaggttcgaggttgttccttttatagctgttggaaggcggtggtgtgtcgccctaaaagcaggggttctgtgaagaaatgcttgtttgaaaggtgcaccctaggtatcctttctgagggcaactccagggtgcgccataatgtggcttcgaactgcggttgcttcatgcaagtgaagggggtgagcgttatcaagcataactcggtctgtggaaactgcgaggatcgcgcctctcagatgctgacctgctttgatggcaactgtcacctgttgaagaccattcatataagcagtcaccccagaaaggcctggcccgtgtttgagcataacattctgacccgctgttccttgcatctgggggtcaggaggggtatgttcctgccttaccagtgtaactttagccacactaaaatcctgctggaacccgagtgcatgactaaggtcagcctgaatggtgtgtttgatgtgagtctgaagatttggaaggtgctgaggtatgatgagaccaggaccaggtgccgaccctgcgagtgcggcggcaagcacatgagaaatcagcctgtgatgttggatgtgaccgaggagcttaggcctgaccatctggtgctggcctgcaccagggccgagtttgggtctagcgatgaggataccgattgaggtgggtaaggtgggcgtggctagcagggtgggcgtgtataaattgggggtctaaggggtctctctgtttgtcttgcaacagccgccgccatgagcgacaccggcaacagctttgatggaagcatctttagtccctatctgacagtgcgcatgcctcactgggccggagtgcgtcagaatgtgatgggttccaacgtggatggacgtcccgttctgccttcaaattcgtctactatggcctacgcgaccgtgggaggaactccgctggacgccgcgacctccgccgccgcctccgccgccgccgcgaccgcgcgcagcatggctacggacctttacagctctttggtggcgagcagcgcggcctctcgcgcgtctgctcgggatgagaaactgactgctctgctgcttaaactggaagacttgacccgggagctgggtcaactgacccagcaggtttccagcttgcgtgagagcagccttgcctccccctaatggcccataatataaataaaagccagtctgtttggattaagcaagtgtatgttctttatttaactctccgcgcgcggtaagcccgggaccagcggtctcggtcgtttagggtgcggtggattttttccaacacgtggtacaggtggctctggatgtttagatacatgggcatgagtccatccctggggtggaggtagcaccactgcagagcttcgtgctcgggggtggtgttgtatatgatccagtcgtagcaggagcgctgggcgtggtgctgaaaaatgtccttaagcaagaggcttatagctagggggaggcccttggtgtaagtgtttacaaatctgcttagctgggaggggtgcatccggggggatatgatgtgcatcttggactggatttttaggttggctatgttcccgcccagatcccttctgggattcatgttgtgcaggaccaccagcacggtatatccagtgcacttgggaaatttatcgtggagcttagacgggaatgcatggaagaacttggagacgcccttgtggcctcccagattttccatacattcgtccatgatgatggcaatgggcccgtgggaagctgcctgagcaaaaacgtttctggcatcgctcacatcgtagttatgttccagggtgaggtcatcataggacatctttacgaatcgggggcgaagggtcccggactgggggatgatggtaccctcgggccccggggcgtagttcccctcacagatctgcatctcccaggctttcatttcagagggagggatcatatccacctgcggggcgatgaaaaagacagtttctggcgcaggggagattaactgggatgagagcaggtttctgagcagctgtgactttccacagccggtgggcccatatatcacgcctatcaccggctgcagctggtagttaagagagctgcagctgccgtcctcccggagcaggggggccacctcgttgagcatatccctgacgtggatgttctccctgaccagttccgccagaaggcgctcgccgcccagcgaaagcagctcttgcaaggaagcaaaatttttcagcggtttcaggccatcggccgtgggcatgtttttcagcgtctgggtcagcagctccagcctgtcccagagctcggtgatgtgctctacggcatctcgatccagcagatctcctcgtttcgcgggttggggcggctttcgctgtagggcaccagccgatgggcgtccagcggggccagagtcatgtccttccatgggcgcagggtcctcgtcagggtggtctgggtcacggtgaaggggtgcgctccgggttgggcactggccagggtgcgcttgaggctggttctgctggtgctgaatcgctgccgctcttcgccctgcgcgtcggccaggtagcatttgaccatggtctcgtagtcgagaccctcggcggcgtgccccttggcgcggagctttcccttggaggtggcgccgcacgaggggcactgcaggctcttcagggcgtagagcttgggagcgagaaacacggactctggggagtaggcgtccgcgccgcaggccgagcagaccgtctcgcattccaccagccaagtgagttccgggcggtcagggtcaaaaaccaggttgcccccatgctttttgatgcgtttcttaccttggctctccatgaggcggtgtcccttctcggtgacgaagaggctgtccgtgtccccgtagaccgacttcaggggcctgtcttccagcggagtgcctctgtcctcctcgtagagaaactctgaccactctgagacgaaggcccgcgtccaggccaggacgaaggaggccacgtgggaggggtagcggtcgttgtccactagcgggtccaccttctccagggtgtgcaggcacatgtccccctcctccgcgtccagaaaagtgattggcttgtaggtgtaggacacgtgaccgggggttcccaacgggggggtataaaagggggtgggtgccctttcatcttcactctcttccgcatcgctgtctgcgagagccagctgctggggtaagtattccctctcgaaggcgggcatgacctcagcgctcaggttgtcagtttctaaaaatgaggaggatttgatgttcacctgtccggaggtgatacctttgagggtacctgggtccatctggtcagaaaacactatttttttgttatcaagcttggtggcgaatgacccgtagagggcgttggagagcagcttggcgatggagcgcagggtctggtttttgtcgcggtcggctcgctccttggccgcgatgttgagttgcacgtactcgcgggccacgcacttccactcggggaacacggtggtgcgctcgtctgggatcaggcgcaccctccagccgcggttgtgcagggtgaccatgtcgacgctggtggcgacctcaccgcgcagacgctcgttggtccagcagaggcggccgcccttgcgcgagcagaaggggggtagggggtccagctggtcctcgtttggggggtccgcgtcgatggtaaagaccccggggagcaggcgcgggtcaaagtagtcgatcttgcaagcttgcatgtccagagcccgctgccattcgcgggcggcgagcgcgcgctcgtaggggttgaggggcgggccccagggcatggggtgggtgagcgcggaggcgtacatgccgcagatgtcatacacgtacaggggttccctgaggataccgaggtaggtggggtagcagcgccccccgcggatgctggcgcgcacgtagtcatagagctcgtgggagggggccagcatgttgggcccgaggttggtgcgctgggggcgctcggcgcggaagacgatctgcctgaagatggcgtgggagttggaggagatggtgggccgctggaagacgttgaagcttgcttcttgcaagcccacggagtccctgacgaaggaggcgtaggactcgcgcagcttgtgcaccagctcggcggtgacctggacgtcgagcgcacagtagtcgagggtctcgcggatgatgtcatacctatcctcccccttctttttccacagctcgcggttgaggacgaactcttcgcggtctttccagtactcttggaggggaaacccgtccgtgtccgaacggtaagagcctagcatgtagaactggttgacggcctggtaggggcagcagcccttctccacgggcagcgcgtaggcctgcgccgccttgcggagggaggtgtgggtgagggcgaaagtgtccctgaccatgactttgaggtattgatgtctgaagtctgtgtcatcgcagccgccctgttcccacagggtgtagtccgtgcgctttttggagcgcgggttgggcagggagaaggtgaggtcattgaagaggatcttccccgctcgaggcatgaagtttctggtgatgcgaaagggccctgggaccgaggagcggttgttgatgacctgggcggccaggacgatctcgtcaaagccgtttatgttgtgtcccacgatgtagagctccaggaagcggggctggcccttgatggaggggagctttttaagttcctcgtaggtaagctcctcgggcgattccaggccgtgctcctccagggcccagtcttgcaagtgagggttggccgccaggaaggatcgccagaggtcgcgggccatgagggtctgcaggcggtcgcggaaggttctgaactgccgccccacggccattttttcgggggtgatgcagtagaaggtgagggggtctttctcccaggggtcccatctgagctctcgggcgaggtcgcgcgcggcagcgaccagagcctcgtcgccccccagtttcatgaccagcatgaagggcacgagttgcttgccaaaggctcccatccaagtgtaggtttctacatcgtaggtgacaaagaggcgctccgtgcgaggatgagagccgattgggaagaactggatctcccgccaccagttggaggattggctgttgatgtggtgaaagtagaagtcccgtctgcgggccgagcactcgtgctggcttttgtaaaagcgaccgcagtactggcagcgctgcacgggttgtatatcttgcacgaggtgaacctggcgacctctgacgaggaagcgcagcgggaatctaagtcccccgcctggggtcccgtgtggctggtggtcttttactttggttgtctggccgccagcatctgtctcctggagggcgatggtggaacagaccaccacgccgcgagagccgcaggtccagatctcggcgctcggcgggcggagtttgatgacgacatcgcgcacattggagctgtccatggtctccagctcccgcggcggcaggtcagccgggagttcctggaggttcacctcgcagagacgggtcaaggcgcggacagtgttgagatggtatctgatttcaaggggcatgttggaggcggagtcgatggcttgcaggaggccgcagccccggggggccacgatggttccccgcggggcgcgaggggaggcggaagctgggggtgtgttcagaagcggtgacgcgggcgggcccccggaggtagggggggttccggccccacaggcatgggcggcaggggcacgtcttcgccgcgcgcgggcaggggctggtgctggctccgaagagcgcttgcgtgcgcgacgacgcgacggttggtgtcctgtatctggcgcctctgagtgaagaccacgggtcccgtgaccttgaacctgaaagagagttcgacagaatcaatctcggcatcgttgacagcggcctggcgcaggatctcctgcacgtcgcccgagttgtcctggtaggcgatttctgccatgaactgctcgatctcttcctcctggagatctcctcgtccggcgcgctccacggtggccgccaggtcgttggagatgcgacccatgagctgcgagaaggcgttgagtccgccctcgttccagacccggctgtagaccacgcccccctcggcgtcgcgggcgcgcatgaccacctgggccaggttgagctccacgtgtcgcgtgaagacggcgtagttgcgcaggcgctggaaaaggtagttcagggtggtggcggtgtgctcggcgacgaagaagtacatgacccagcgccgcaacgtggattcattgatgtcccccaaggcctccaggcgctccatggcctcgtagaagtccacggcgaagttgaaaaactgggagttgcgagcggacacggtcaactcctcctccagaagacggatgagctcggcgacagtgtcgcgcacctcgcgctcgaaggccacggggggcgcttcttcctcttccacctcttcttccatgattgcttcttcttcttcctcagccgggacgggagggggcggcggcgggggaggggcgcggcggcggcggcggcgcaccgggaggcggtcgatgaagcgctcgatcatctccccccgcatgcggcgcatggtctcggtgacggcgcggccgttctcccgggggcgcagctcgaagacgccgcctctcatttcgccgcggggcgggcggccgtgaggtagcgagacggcgctgactatgcatcttaacaattgctgtgtaggtacgccgccaagggacctgattgagtccagatccaccggatccgaaaacctttggaggaaagcgtctatccagtcgcagtcgcaaggtaggctgagcaccgtggcgggcgggggcgggtcgggagagttcctggcggagatgctgctgatgatgtaattaaagtaggcggtcttgagaaggcggatggtggacaggagcaccatgtctttgggtccggcctgttggatgcggaggcggtcggccatgccccaggcctcgttctgacaccggcgcaggtctttgtagtaatcttgcatgagtctttccaccggcacttcttctccttcctcttcttcatctcgccggtggtttctcgcgccgcccatgcgcgtgaccccaaagcccctgagcggctgcagcagggccaggtcggcgaccacgcgctcggccaagatggcctgctgtacctgagtgagggtcctctcgaagtcatccatgtccacgaagcggtggtaggcacccgtgttgatggtgtaggtgcagttggccatgacggaccagttgacggtctggtgtcccggctgcgagagctccgtgtaccgcaggcgcgagaaggcgcgggaatcgaacacgtagtcgttgcaagtccgcaccagatactggtagcccaccaggaagtgcggcggaggttggcgatagaggggccagcgctgggtggcgggggcgccgggcgccaggtcttccagcatgaggcggtggtatccgtagatgtacctggacatccaggtgatgcctgcggcggtggtggtggcgcgcgcgtagtcgcggacccggttccagatgtttcgcaggggcgagaagtgttccatggtcggcacgctctggccggtgaggcgcgcgcagtcgttgacgctctatacacacacaaaaacgaaagcgtttacagggctttcgttctgtagcctggaggaaagtaaatgggttgggttgcggtgtgccccggttcgagaccaagctgagctcagccggctgaagccgcagctaacgtggtattggcagtcccgtctcgacccaggccctgtatcctccaggatacggtcgagagcccttttgctttcttggccaagcgcccgtggcgcgatctgggatagatggtcgcgatgagaggacaaaagcggctcgcttccgtagtctggagaaacaatcgccagggttgcgttgcggcgtaccccggttcgagcccctatggcggcttggatcggccggaaccgcggctaacgtgggctgtggcagccccgtcctcaggaccccgccagccgacttctccagttacgggagcgagccccttttgtttttttattttttagatgcatcccgtgctgcggcagatgcgcccctcgccccggcccgatcagcagcagcaacagcaggcatgcagacccccctctcctctccccgccccggtcaccacggccgcggcggccgtgtccggtgcggggggcgcgctggagtcagatgagccaccgcggcggcgacctaggcagtatctggacttggaagagggcgagggactggcgcggctgggggcgagctctccagagcgccacccgcgggtgcagttgaaaagggacgcgcgtgaggcgtacctgccgcggcaaaacctgtttcgcgaccgcgggggcgaggagcccgaggagatgcgggactgcaggttccaagcggggcgcgagctgcgccgcggcttggacagacagcgcctgctgcgcgaggaggactttgagcccgacacgcagacgggcatcagccccgcgcgcgcgcacgtggccgcggccgacctggtgaccgcctacgagcagacggtgaaccaggagcgcaacttccaaaaaagcttcaacaaccacgtgcgcacgctggtggcgcgcgaggaggtgaccctgggtctcatgcatctgtgggacctggtggaggcgatcgtgcagaaccccagcagcaagcccctgaccgcgcagctgttcctggtggtgcagcacagcagggacaacgaggccttcagggaggcgctgctgaacatcaccgagccggaggggcgctggctcctggacctgataaacatcctgcagagcatagtggtgcaggagcgcagcctgagcctggccgagaaggtggcggccattaactattctatgctgagcctgggcaagttctacgctcgcaagatctacaagaccccctacgtgcccatagacaaggaggtgaagatagacagcttctacatgcgcatggcgctgaaggtgctaaccctgagcgacgacctgggagtgtaccgcaacgagcgcatccacaaggccgtgagcgccagccggcggcgcgagctgagcgaccgcgaactgatgcacagtctgcagcgcgcgctgaccggcgcgggcgagggcgacagggaggtcgagtcctactttgacatgggggccgacctgcactggcagccgagccgccgcgccctggaagcggcgggggcgtacggcggccccctggcggccgatgacgaggaagaggaggactatgagctagaggagggcgagtacctggaggactgacctggctggtggtgttttggtatagatgcaagatccgaacgtggcggacccggcggtccgggcggcgctgcagagccagccgtccggcattaactcctctgacgactgggccgcggccatgggtcgcatcatggccctgaccgcgcgcaaccccgaggccttcaggcagcagcctcaggctaaccggctggcggccatcttggaagcggtagtgcccgcgcgctccaaccccacccacgagaaggtgctggccatagtcaacgcgctggcggagagcagggccatccgggcagacgaggccggactggtgtacgatgcgctgctgcagcgggtggcgcggtacaacagcggcaacgtgcagaccaacctggaccgcctggtgacggacgtgcgcgaggccgtggcgcagcgcgagcgcttgcatcaggacggcaacctgggctcgctggtggcgctaaacgccttccttagcacccagccggccaacgtaccgcgggggcaggaggactacaccaacttcttgagcgcgctgcggctgatggtgaccgaggtccctcagagcgaggtgtaccagtcggggcccgactacttcttccagaccagcagacagggcttgcaaaccgtgaacctgagccaggctttcaagaacctgcgggggctgtggggagtgaaggcgcccaccggcgaccgggctacggtgtccagcctgctaacccccaactcgcgcctgctgctgctgctgatcgcgcccttcacggacagcgggagcgtctcgcgggagacctatctgggccacctgctgacgctgtaccgcgaggccatcgggcaggcgcaggtggacgagcacaccttccaggagatcaccagcgtgagccacgcgctggggcaggaggacacgggcagcctgcaggcgaccctgaactacctgctgaccaacaggcggcagaagattcccacgctgcacagcctgacccaggaggaggagcgcatcttgcgctacgtgcagcagagcgtgagcctgaacctgatgcgcgacggcgtgacgcccagcgtggcgctggacatgaccgcgcgcaacatggaaccgggcatgtacgcttcccagcggccgttcatcaaccgcctgatggactacttgcatcgggcggcggccgtgaaccccgagtacttcaccaatgccattctgaatccccactggatgccccctccgggtttctacaacggggacttcgaggtgcctgaggtcaacgatgggttcctctgggatgacatggatgacagtgtgttctcccccaacccgctgcgcgccgcgtctctgcgattgaaggagggctctgacagggaaggaccaaggagtctggcctcctccctggctctgggggcggtgggcgccacgggcgcggcggcgcggggcagcagccccttccccagcctggcggactctctgaatagcgggcgggtgagcaggccccgcttgctaggcgaggaggagtatctgaacaactccctgctgcagcccgtgagggacaaaaacgctcagcggcagcagtttcccaacaatgggatagagagcctggtggacaagatgtccagatggaagacgtatgcgcaggagtacaaggagtgggaggaccgccagccgcggcccctgccgccccctagacagcgctggcagcggcgcgcgtccaaccgccgctggaggcaggggcccgaggacgatgatgactctgcagatgacagcagcgtgttggacctgggcgggagcgggaaccccttttcgcacctgcgcccacgcctgggcaagatgttttaaaagagaaaaataaaaactcaccaaggccatggcgacgagcgttggttttttgttcccttccttagtatgcggcgcgcggcgatgttcgaggaggggcctcccccctcttacgagagcgcgatgggaatttctcctgcggcgcccctgcagcctccctacgtgcctcctcggtacctgcaacctacaggggggagaaatagcatctgttactctgagctgcagcccctgtacgataccaccagactgtacctggtggacaacaagtccgcggacgtggcctccctgaactaccagaacgaccacagcgattttttgaccacggtgatccaaaacaacgacttcaccccaaccgaggccagtacccagaccataaacctggacaacaggtcgaactggggcggcgacctgaagactatcctgcacaccaatatgcccaacgtgaacgagttcatgttcaccaactcttttaaggcgcgggtgatggtggcgcgcgagcagggggaggcgaagtacgagtgggtggacttcacgctgcccgagggcaactactcagagaccatgactctcgacctgatgaacaatgcgatcgtggaacactatctgaaagtgggcaggcagaacggggtgaaggagagcgatatcggggtcaagtttgacaccagaaacttccgtctgggctgggaccctgtgaccgggctggtcatgccgggggtctacaccaacgaggcctttcatcccgatatagtgctcctgcccggctgtggggtggacttcacccagagccggctgagcaacctgctgggcgttcgcaagcggcaacctttccaggagggtttcaagatcacctatgaggatctggaggggggcaacattcccgcgctccttgatctggacgcctacgaggagagcttgaaacccgaggagagcgctggcgacagcggcgagagtggcgaggagcaagccggcggcggcggcagcgcgtcggtagaaaacgaaagtactcccgcagtggcggcggacgctgcggaggtcgagccggaggccatgcagcaggacgcagaggagggcgcgcaggaggacatgaacaatggggagatcaggggcgacactttcgccacccggggcgaagaaaaagaggcagaggcggcggcggcgacggcggaagccgaaaccgaggcagaggcagagcccgagaccgaagttatggaagacatgaatgatggagaacgtaggggtgacacgtttgccacccggggcgaagagaaggcggcggaggcagaagccgcggctgaggaggcggctgcggctgcggccaaggctgaggctgcggctgaggctaaggtcgaagccgatgttgcggttgaggctcaggctgaggaggaggcggcggctgaagcagttaaggaaaaggcccaggcagagcaggaagagaaaaaacctgtcattcaacctctaaaagaagatagcaaaaagcgcagttacaacgtcattgagggcagcacctttacccaataccgcagctggtacctggcttacaactacggcgacccggtcaagggggtgcgctcgtggaccctgctctgcacgccggacgtcacctgcggctccgagcagatgtactggtcgctgccaaacatgatgcaagacccggtgaccttccgttccacgcggcaggttagcaactttccggtggtgggcgccgaactgctgccagtacactccaagagtttttacaacgagcaggccgtctactcccagctgatccgccaggccacctctctgacccacgtgttcaatcgctttcccgagaaccagattttggcgcgcccgccggcccccaccatcaccaccgtcagtgaaaacgttcctgccctcacagatcacgggacgctaccgctgcgcaacagcatctcaggagtccagcgagtgaccattactgacgccagacgccggacctgcccctacgtttacaaggccttgggcatagtctcgccgcgcgtcctctccagtcgcactttttaaaacacatccacccacacgctccaaaatcatgtccgtactcatctcgcccagcaacaacaccggctgggggctgcgcgcacccagcaagatgtttggaggggcaaggaagcgctccgaccagcaccccgtgcgcgtgcgcggccactaccgcgcgccctggggtgcgcacaagcgcgggcgcacagggcgcaccactgtggatgatgtcattgactccgtagtggagcaggcgcgccactacacacccggcgcgccgaccgcctccgccgtgtccaccgtggaccaggcgatcgaaagcgtggtacagggggcgcggcactatgccaaccttaaaagtcgccgccgccgcgtggcgcgccgccatcgccggagaccccgggctactgccgccgcgcgccttaccaaggctctgctcaagcgcgccaggcgaactggccaccgggccgccatgagggccgcacggcgggctgccgctgccgcgagcgccgtggccccgcgggcacgaaggcgcgcggccgctgccgccgccgccgccatttccagcttggcctcgacgcggcgcggtaacatatactgggtgcgcgactcggtgagcggcacacgtgtgcccgtgcgctttcgccccccacggaattagcacaagacaacatacacactgagtctcctgctgttgtgtatcccagcggcgaccgtcagcagcggcgacatgtccaagcgcaaaattaaagaagagatgctccaggtcatcgcgccggagatctatgggcccccgaagaaggaggaggaggattacaagccccgcaagctaaagcgggtcaaaaagaaaaagaaagatgatgacgttgacgaggcggtggagtttgtccgccgcatggcgcccaggcgccctgtgcagtggaagggtcggcgcgtgcagcgagtcctgcgccccggcaccgcggtggtctttacgcccggcgagcgttccacgcgcactttcaagcgggtgtacgatgaggtgtacggcgacgaggatctgttggagcaggccaaccatcgatttggggagtttgcatatgggaaacggcctcgcgagagtctaaaagaggacctgctggcgctaccgctggacgagggcaatcccaccccgagtctgaagccggtgaccctgcaacaggtgctgcctttgagcgcgcccagcgagcagaagcgagggttaaagcgcgagggcggggacctggcacccaccgtgcagttgatggtgcccaagcggcagaagctggaggacgtgctggagaaaatgaaagtagagcccgggatccagcccgagatcaaggtccgccctatcaagcaggtggcgcccggcgtgggagtccagaccgtggacgttaggattcccacggaggagatggaaacccaaaccgccactccctcttcggcagcaagcgccaccaccggcgccgcttcggtagaggtgcagacggacccctggctacccgccgccactatcgccgtcgccgccgccccccgttcgcgcggacgcaagagaaattatccagcggccagcgcgcttatgccccagtatgcgctgcatccatccatcgcgcccacccccggctaccgcgggtactcgtaccgcccgcgcagatcagccggcactcgcggccgccgccgccgtgcgaccacaaccagccgccgccgtcgccgccgccgccagccagtgctgacccccgtgtctgtaaggaaggtggctcgctcggggagcacgctggtggtgcccagagcgcgctaccaccccagcatcgtttaaagccggtctctgtatggttcttgcagatatggccctcacttgtcgccttcgcttcccggtgccgggataccgaggaagaactcaccgccgcaggggcatggcgggcagcggtctccgcggcggccgtcgccatcgccggcgcgcaaagagcaggcgcatgcgcggcggtgtgttgcccctgctggtcccgctactcgccgcggcgatcggcgccgtgcccgggatcgcctccgtggccctgcaggcgtcccagaaacattgactcttgcaaccttgcaagcttgcatttttggaggaaaaaataaaaaagtctagactctcacgctcgcttggtcctgtgactattttgtagaaaaaagatggaagacatcaactttgcgtcgctggccccgcgtcacggctcgcgcccgttcatgggagactggacagatatcggcaccagcaatatgagcggtggcgccttcagctggggcagtctgtggagcggccttaaaaattttggttccaccattaagaactatggcaacaaagcgtggaacagcagcacgggtcagatgctgagagacaagttgaaagagcagaacttccaggagaaggtggcgcagggcctggcctctggcatcagcggggtggtggacatagctaaccaggccgtgcagaaaaagataaacagtcatctggacccccgccctcaggtggaggaaacgcctccagccatggagacggtgtctcccgagggcaaaggcgaaaagcgcccgcggcccgacagggaagagaccctggtgtcacacaccgaggagccgccctcttacgaggaggcagtcaaggccggcctgcccaccactcgccccatagctcccatggccaccggtgtggtgggtcacaggcaacacacccccgcaacactagatctgcccccgccgtccgagccgactcgccagccaaaggcggtgacggtgtccgctccctccacttccgccgccaacagagtgcctctgcgccgcgctgcgagcggcccccgggcctcgcgagtcagcggcaactggcagagcacactgaacagcatcgtgggcctgggagtgaggagtgtgaagcgccgccgttgctactgaatgagcaagctagctaacgtgttgtatgtgtgtatgcgtcctatgtcgccgccagaggagctgttgagccgccggcgccgtctgcactccagcgaatttcaagatggcgaccccatcgatgatgcctcagtggtcgtacatgcacatctcgggccaggacgcttcggagtacctgagccccgggctggtgcagttcgcccgcgccacagacacctacttcaacatgagtaacaagttcaggaaccccactgtggcgcccacccacgatgtgaccacggaccggtcgcagcgcctgacgctgcggttcatccccgtggatcgggaggacaccgcttactcttacaaggcgcggttcacgctggccgtgggcgacaaccgcgtgctggacatggcctccacttactttgacatccggggggtgctggacaggggccccacttttaagccctactcgggcactgcctacaaccccctggcccccaagggcgcccccaattcttgtgagtgggaacaagaggaaaatcaggtggtcgctgcagatgatgaacttgaagatgaagaagcgcaagcacaagaggaagcccctgtgaaaaaaattcatgtatatgctcaggcgcctctttctggcgaaaagatttccaaggatggtatccaaataggtactgaagtcgtaggagatacatctaaggacacttttgcagataaaacattccaacccgaacctcagataggcgagtctcagtggaacgaggctgatgccacagcagcaggaggtagagttttgaaaaagactacccctatgagaccttgctatggatcctatgccaggcctaccaatgccaacgggggtcaaggaattatggttgccaatgaacaaggagtgttggagtctaaagtagaaatgcaatttttctctaacaccacaacccttaatgcgcgggatggaaccggcaatcccgaaccaaaggtggtgttgtacagcgaagatgtccacttggaatctcccgatactcatctgtcttacaagcccaaaaaggatgatgttaatgccaaaatcatgttgggtcagcaagccatgcccaacagacccaacctcattggatttagagataatttcattgggcttatgttttacaacagcaccggtaacatgggagtgctggcgggtcaggcctctcagttgaatgctgtggtggacttgcaggatagaaacacagaactgtcatatcagcttctgcttgattcaattggggatagaaccagatacttctccatgtggaaccaggcagtggatagctatgatccagatgtcagaattattgaaaaccatgggactgaggatgaactgcccaactactgcttccctttgggcggcataggagttactgatacttatcaagggataaaaaataccaatggcaatggtcagtggaccaaagatgatcagttcgcggaccgcaacgaaataggggtgggaaacaacttcgccatggagatcaacatccaggccaacctttggagaaacttcctctatgcaaacgtggggctctacctgccagacaagctcaagtacaaccccaccaacgtggacatctctgacaaccccaacacctatgactacatgaacaagcgggtggtggcccctggcctggtggactgctttgtcaatgtgggagccaggtggtccctggactacatggacaacgtcaaccccttcaaccaccaccgcaatgcgggtctgcgctaccgctccatgatcctgggcaacgggcgctatgtgccctttcacatccaggtaccccagaagttctttgccatcaagaacctcctgctcctgcccggctcctacacctacgagtggaacttcaggaaggatgtgaacatggtcctacagagctctctgggcaatgaccttagggtggatggggccagcatcaagtttgacagcatcaccctctatgctacatttttccccatggcccacaacaccgcctccacgcttgaggccatgctgagaaacgacaccaacgaccagtcctttaatgactacctctctggggccaacatgctctacccaatcccagccaaggccaccaacgtgcccatctccatcccctctcgcaactgggccgcctttagaggctgggcctttacccgccttaagaccaaggagaccccctccctgggctcgggttttgatccctactttgtttactcgggatccatcccctacctggatggcaccttctacctcaaccacactttcaagaagatatccatcatgtatgactcctccgtcagctggccgggcaacgaccgcttgctcacccccaatgagttcgaggtcaagcgcgccgtggacggcgagggctacaacgtggcccagtgcaacatgaccaaggactggttcctggtgcagatgctggccaactacaacataggctaccagggcttttacatcccagagagctacaaggacaggatgtactccttcttcagaaatttccaacccatgagccgacaggtggtggacgagaccaattacaaggactatcaagccattggcatcacccaccagcacaacaactcgggtttcgtgggctacctggcgcccaccatgcgcgagggtcaggcctaccccgccaacttcccctaccccttgataggcaagaccgcggtcgacagcgtcacccagaaaaagttcctctgcgaccgcaccctctggcgcatccccttctctagcaacttcatgtccatgggtgcgctcacggacctgggccaaaacctgctttatgccaactctgcccatgcgctggacatgacttttgaggtggaccccatggacgagcccacccttctctatattgtgtttgaagtgttcgacgtggtcagagtgcaccagccgcaccgcggtgtcatcgagaccgtgtacctgcgtacgcccttctcagccggcaacgccaccacctaaggagacagcgccgccgccgcctgcatgacgggttccaccgagcaagagctcagggccattgccagagacctgggatgcggaccctattttttgggcacctatgacaaacgcttcccgggctttatctcccgagacaagctcgcctgcgccattgtcaacacggccgcgcgcgagaccgggggcgtgcactggctggcctttggctgggacccgcgctccaaaacttgctacctctttgacccctttggcttctccgatcagcgcctcaggcagatttatgagtttgagtacgaggggctgctgcgccgcagcgcgctcgcctcctcgcccgaccgctgcatcacccttgagaagtccaccgaaaccgtgcaggggccccactcggccgcctgcggtctcttctgttgcatgtttttgcacgcctttgtgcactggcctcagagtcccatggattgcaaccccaccatgaacttgctaaagggagtgcccaacgccatgctccagagcccccaggtccagcccaccctgcgccgcaaccaggaacagctttaccgcttcctggagcgccactccccctacttccgcagccacagcgcgcgcatccggggggccacctctttttgccacttgcaagaaaacatgcaagacggaaaatgatgtacagcatgcttttaataaatgtaaagactgtgcactttaattatacacgggctctttctggttatttattcaacaccgccgtcgccatttagaaatcgaaagggttctgccgtgcgtcgccgtgcgccacgggcagagacacgttgcgatactggaagcggctcgcccacttgaactcgggcaccaccatgcggggcagtggttcctcggggaagttctcgctccacagggtgcgggtcagctgcagcgcgctcaggaggtcgggagccgagatcttgaagtcgcagttggggccggaaccctgcgcgcgcgagttgcggtacacggggttgcagcactggaacaccagcagggccggattattcacgctggccagcaggctctcgtcgctgatcatgtcgctgtccagatcctccgcgttgctcagggcgaatggggtcatcttgcagacctgcctgcccaggaaaggcgggagcccaggcttgccgttgcagtcgcagcgcaggggcattagcaggtgcccacggcccgactgcgcctgcgggtacaacgcgcgcatgaaggcttcgatctgcctaaaagccacctgggtcttggctccctccgaaaagaacatcccacaggacttgctggagaactggttcgcgggacagctggcatcgtgcaggcagcagcgcgcgtcagtgttggcaatctgcaccacgttgcgaccccaccggtttttcactatcttggccttggaagcctgctcctttagcgcgcgctggccgttctcgctggtcacatccatctctatcacctgttccttgttgatcatgtttgtcccgtgcagacactttaggtcgccctccgtctgggtgcagcggtgctcccacagcgcgcaaccggtgggctcccaattcttgtgggtcacccccgcgtaggcctgcaggtaggcctgcaggaagcgccccatcatggtcataaaggtcttctggctcgtaaaggtcagctgcaggccgcgatgctcttcgttcagccaggtcttgcagatggcggccagcgcctcggtctgctcgggcagcatcttaaaatttgtcttcaggtcgttatccacgtggtacttgtccatcatggcacgcgccgcctccatgcccttctcccaggcggacaccatgggcaggcttagggggtttatcacttccagcggcgaggacaccgtactttcgatttcttcttcctccccctcttcccggcgcgcgcccccgctgttgcgcgctcttaccgcctgcaccaaggggtcgtcttcaggcaagcgccgcaccgagcgcttgccgcccttgacctgcttgatcagtaccggcgggttgctgaagcccaccatggtcagcgccgcctgctcttcttcgtcttcgctgtctaccactatttctggggaggggcttctccgctctgcggcaaaggcggcggatcgcttcttttttttcttgggagccgccgcgatggagtccgccacggcgaccgaggtcgagggcgtggggctgggggtgcgcggtaccagggcctcgtcgccctcggactcttcctctgactccaggcggcggcggagtcgcttctttgggggcgcgcgcgtcagcggcggcggagacggggacggggacggggacgggacgccctccacagggggtggtcttcgcgcagacccgcggccgcgctcgggggtcttctcgcgctggtcttggtcccgactggccattgtatcctcctcctcctaggcagagagacataaggagtctatcatgcaagtcgagaaggaggagagcttaaccaccccctcagagaccgccgatgcgcccgccgtcgccgtcgcccccgctaccgccgacgcgcccgccacaccgagcgacacccccacggacccccccgccgacgcacccctgttcgaggaagcggccgtggagcaggacccgggctttgtctcggcagaggaggatttgcaagaggaggagaataaggaggagaagccctcagtgccaaaagatcataaagagcaagacgagcacgacgcagacgcacaccagggtgaagtcgggcggggggacggagggcatggcggcgccgactacctagacgaaggaaacgacgtgctcttgaagcacctgcatcgtcagtgcgccatcgtctgcgacgctctgcaggagcgcagcgaggtgcccctcagcgtggcggaggtcagccgcgcctacgagctcagcctcttttccccccgggtgcccccccgccgccgcgaaaacggcacatgcgagcccaacccgcgcctcaacttctaccccgcctttgtggtgcccgaggtcctggccacctatcacatcttctttcaaaattgcaagatccccatctcgtgccgcgccaaccgtagccgcgccgataagatgctggccctgcgccagggcgaccacatacctgatatcgccgctttggaagatgtgccaaagatcttcgagggtctggggcgcaacgagaagcgggcagcaaactctctgcaacaggaaaacagcgaaaatgagagtcacactggagcgctggtggagctggagggcgacaacgcccgcctggcggtgctcaagcgcagcatcgaggtcacccactttgcctaccccgcgctcaacctgccccccaaagtcatgaacgcggtcatggacgggctgatcatgcgccgcggccggcccctcgctccagatgcaaacttgcatgaggagaccgaggacggtcagcccgtggtcagcgacgagcagctgacgcgctggctggagagcgcggaccccgccgaactggaggagcggcgcaagatgatgatggccgcggtgctggtcaccgtagagctggagtgtctgcagcgcttcttcggtgaccccgagatgcagagaaaggtcgaggagaccctacactacaccttccgccagggctacgtgcgccaggcttgcaagatctccaacgtggagctcagcaacctggtgtcctacctgggcatcttgcatgaaaaccgccttgggcagagcgtgctacactccaccctgcgcggggaggcgcgccgcgactacgtgcgcgactgcgtttacctcttcctctgctacacctggcagacggccatgggggtctggcagcagtgcctggaggagcgcaacctcaaggagctggagaagcttctgcagcgcgcgctcaaagacctctggacgggcttcaacgagcgctcggtggccgccgcgctagccgacctcatcttccccgagcgcctgctcaaaaccctccagcaggggctgcccgacttcaccagccaaagcatgttgcaaaattttaggaactttatcctggagcgttctggcatcctacccgccacctgctgcgccctgcccagcgactttgtccccctcgtgtaccgcgagtgccccccgccgctgtggggccactgctacctgttccaactggccaactacctgtcctaccacgcggacctcatggaggactccagcggcgaggggctcatggagtgccactgccgctgcaacctctgcacgccccaccgctccctggtctgcaacacccaactgctcagcgagagtcagattatcggtaccttcgagctacagggtccgtcctcctcagacgagaagtccgcggctccggggctaaaactcactccggggctgtggacttccgcctacctgcgcaaatttgtacctgaagactaccacgcccacgaaatcaggttttacgaggaccaatcccgcccgcccaaggcggagctgaccgcctgcgtcatcacccagggcgagatcctaggccaattgcaagccatccaaaaagcccgccaagagtttttgctgaagaggggtcggggggtgtatctggacccccagtcgggtgaggagctcaacccggttcccccgctgccaccgccgcgggaccttgcttcccaggataagcatcgccatggctcccagaaagaagcagcagcggccgccgctgccgccgccccacatgctggaggaagaggaggaatactgggacagtcaggcagaggaggtttcggacgaggaggagccggagacggagatggaagagtgggaggaggacagcttagacgaggaggcttccgaagccgaagaggcaggcgcaacaccgtcaccctcggccgcagccccctcgcaggcgcccccgaagtccgctcccagcatcagcagcaacagcagcgctataacctccgctcctccaccgccgcgacccacggccgaccgcagacccaaccgtagatgggacaccaccggaaccggggccggtaagtcctccgggagaggcaagcaagcgcagcgccaaggctaccgctcgtggcgcgctcacaagaacgccatagtcgcttgcttgcaagactgcggggggaacatctccttcgcccgccgcttcctgctcttccaccacggtgtggccttcccccgtaacgtcctgcattactaccgtcatctctacagcccctactgcggcggcagtgagccagaggcggccagcggcggcggcgcccgtttcggtgcctaggaagacccagggcaagacttcagccaagaaactcgcggcgaccgcggcgaacgcggtcgcgggggccctgcgcctgacggtgaacgaacccctgtcgacccgcgaactgaggaaccgaatcttccccactctctatgccatcttccagcagagcagagggcaggatcaggaactgaaagtaaaaaacaggtctctgcgctccctcacccgcagctgtctgtatcacaagagcgaagaccagcttcggcgcacgctggaggacgctgaggcactcttcagcaaatactgcgcgctcactcttaaggactagctccgcgcccttctcgaatttaggcgggaacgcctacgtcatcgcagcgccgccgtcatgagcaaggacattcccacgccatacatgtggagctatcagccgcagatgggactcgcggcgggcgcctcccaagactactccacccgcatgaactggctcagtgccggcccacacatgatctcacaggttaatgacatccgcacccatcgaaaccaaatattggtgaagcaggcggcaattaccaccacgccccgcaataatcccaaccccagggagtggcccgcgtccctggtgtatcaggaaattcccggccccaccaccgtactacttccgcgtgattcccaggccgaagtccaaatgactaactcaggggcacagctcgcgggcggctgtcgtcacagggtgcggcctcctcgccagggtataactcacctggagatccgaggcagaggtattcagctcaacgacgagtcggtgagctcctcgctcggtctcagacctgacgggaccttccagatagccggagccggccgatcttccttcacgccccgccaggcgtacctgactctgcagagctcgtcctcggcgccgcgctcgggcggcatcgggactctccagttcgtgcaggagtttgtgccctcggtctacttcaaccccttctcgggctctcccggtcgctacccggaccagtttatcccgaactttgacgccgcgagggactcggtggacggctacgactgaatgtcgggtggacccggtgcagagcaacttcgcctgaagcaccttgaccactgccgccgccctcagtgctttgcccgctgtcagaccggtgagttccagtacttttccctgcccgactcgcacccggacggcccggcgcacggggtgcgctttttcatcccgagtcaggtccgctctaccctaatcagggagttcaccgcccgtcccctactggcggagttggaaaaggggccttctatcctaaccattgcctgcatttgctctaaccctggattacaccaagatctttgctgtcatttgtgtgctgagtataataaaggctgagatcagaatctactcgggctcctgtcgccatcctgtcaacgccaccgtccaagcccggcccgatcagcccgaggtgaacctcacctgtggtctgcaccggcgcctgaggaaatacctagcttggtactacaacagcactccctttgtggtttacaacagctttgaccaggacggggtctcactgagggataacctctcgaacctgagctactccatcaggaagaacaacaccctcgagctacttcctccttacctgcccgggacttaccagtgtgtcaccggcccctgcacccacacccacctgttgatcgtaaacgactctcttccgagaacagacctcaataactcctctccgcagttccccagaacaggaggtgagctcaggaaaccccgggtaaagaagggtggacaagagttaacacttgtggggtttctggtatatgtgacgctggtggtggctcttttgattaaggcttttccttccatgtctgaactatccctcttcttttatgaacaactcgactagtgctaacgggaccctacccaacgaatcgggattgaatatcggtaaccaggttgcagtttcacttttgattaccttcatagtcctcttcctgctagtgctgtcgcttctgtgcctgcggatcgggggctgctgcatccacgtttatatctggtgctggctgtttagaaggttcggagaccaccgcaggtagaataatgctgcttaccctctttgtcctggcgctggctgccagctgccaagccttttccgaggctgacttcatagagccccagtgcaatatcacttataaatctgaacgtgccatctgtactattctaatcaaatgtgttactcaacacgataaggtgactgttaaatacaaagatcaattaaaaaaagacgcactttacagcagctggcaaccaggagatgatcaaaaatacaatgtaaccgtcttccagggcaaactctccaaaacttacaattacaatttcccatttgagcagatgtgtgactttgtcatgtacatggaaaagcagtacaagctgtggcctccaactccccagggctgtgtggaaaatccaggctctttctgtatgatctctctctgtgtaactgtgctggcactaatactcacgcttctgtatctcagatttaaatcaaggcaaagcttcattgatgaaaagaaaatgccataatcgctcaacgcttgattgctaacaccgggtttttatccgcagaatgattggaatcaccctactaatcacctccctccttgcgattgcccatgggttggaacgaatcgaagtccctgtgggggccaatgttaccctggtggggcctgtcggcaatgctacattaatgtgggaaaaatatactaaaaatcaatgggtttcttactgcactaacaaaaacagccacaagcccagagccatctgcgatgggcaaaatctaaccttgattgatgttcaattgctggatgcgggctactattatgggcagctgggtacaatgattaattactggagaccccacagagattacatgcttcacgtagtaaagggtcccattagcagcccaaccaccacctctaccacacccactaccaccactactcccaccaccagcactgccgcccagcctcctcatagcagaacaaccacttttatcaattccaagtcccactccccccacattgccggcgggccctccgcctcagactccgagaccaccgagatctgcttctgcaaatgctctgacgccattgcccaggatttggaagatcacgaggaagatgagcatgactacgcagatgcatgccaggcatcagaggcagaagcgctaccggtggccctaaaacagtatgcagactcccacaccacccccaaccttcctccaccttcccagaagccaagtttcctgggggaaaatgaaactctgcctctttccatactagctctgacatctgttgctattttggccgctctgctggtgcttctatgctctatatgctacctgatctgctgcagaaagaaaaaatctcacggccatgctcaccagcccctcatgcacttcccttaccctccagagctgggcgaccacaaactttaagtctgcagtagctatctgcccatcccttgtcagtcgacagcgatgagccccactaatctaacagcctctggacttacaacattgtctcttaatgagaccaccgctcctcaagacctgtacgatggtgtctccgcgctggttaaccagtgggatcacctgggcatatggtggctcctcataggagcagtgaccctgtgcctaatcctggtctggatcatctgctgcatcaaaagcagaagacccaggcggcggcccatctacaggcccttcgtcatcacacctgaagataatgatgatgatgacaccacctccaggctgcagagcctaaagcagctactcttctcttttacagcatggtaaattgaatcatgccccgcattttcatctacttgcttctccttccactttttctgggctcctctacattggccactgtgtcccacatcgaggtagactgcctcacgcccttcacagtctacctgcttttcggctttgtcatctgcacctttgtctgcagcgttatcactgtagtgatctgcttcatacagtgcatcgactacatctgtgtgcgggtggcctactttagacaccacccccagtatcgcaacagggacatagcggctctcctaagacttgtttaaatcatggccaaattacctgtgattggtcttctgattatctgctgcgtcctagccgcgattgggactcaacctaataccaccaccagcgctcccagaaagagacatgtatcctgcagcttcaagcgtccctggaatataccccaatgctttactgatgaacctgaaatctctttggcttggtacttcagcgtcaccgcccttctcatcttctgcagtacggttattgctcttgccatctacccttcccttaacctgggctggaatgctgtcaactctatggaatatcccaccttcccagaaccagacctgccagacctggttgttctaaacgcgtttcctcctcctccagttcaaaatcagtttcgccctccgtcccctacgcccactgaggtcagctactttaatctaacaggcggagatgactgaaaacctagacctagaaatggacggtctctgcagcgagcaacgcacactagagaggcgccggcaaaaagcagagctcgagcgtcttaaacaagagctccaagacgccgtggccatacaccagtgcaaaaaagggctcttctgtctggtaaaacaggccacgctcacctatgaaaaaacaggtgacacccaccgcctaggatacaagctgcccacacagcgccaaaagtttgcccttatgataggtgaacaacccatcaccgtcacccagcactccgtggagacagaaggctgcattcatgctccctgcaggggcgctgactgcctctacaccttgatcaaaaccctctgcggtctcagagaccttatccctttcaattgatcataactgtaatcaataaaaaatcacttacttgaaatctgatagcaagactctgtccaattttttcagcaacacttccttcccctcctcccaactctggtactctaggcgcctcctagctgcaaacttcctccacagtctgaagggaatgtcagattcctcctcctgtccctccgcacccacgatcttcatgttgttacagatgaaacgcgcgagatcgtctgacgagaccttcaaccccgtgtacccctacgataccgagatcgctccgacttctgtccctttccttacccctccctttgtatcatccgcaggaatgcaagaaaatccagctggggtgctgtccctg

SEQ ID NO: 623 - protein, 1507 aa, Artificial sequence
  Heterologous polypeptide
MGQKEQIHTLQKNSERMSKQLTRSSQAVGVPGDSTRRAVRRMNTFYEAGMTLGEKFRVGNCKHLKMTRPNSKMALNSEALSVVSECGASACDVSLIAMDSAFVQGKDWGVKKFIRRDFYAYKDFLWCFPFSLVFLQEIQICCHVSCLCCICCSTRICLGCLLELFLSRALRALHVLWNGFQLHCQTEYNQKLQVNQFSESKSLYHREKQLIAMDSAICEERGAAGSLISCETMPAILKLQKNCLLSLRTALTHNQDFSIYRLCCKRGSLCHASQARSPAFPKPVRPLPAPITRITPQLGGQSDSSQPLLTTGRPQGWQDQALRHTQQASPASCATITIPIHSAALGDHSGDPGPAWDTCPPLPLTTLIPRAPPPYGDSTARSWPSRCGPLGGNTTLQQLGEASQAPSGSLIPLRLPLLWEVRGQPDSFAALHSSLNELGEIARELHQFAFDLLIKSHFVQGKDWGLKKFIRRDFWGMELAASRRFSWDHHSAGGPPRVPSVRSGAAQVQPKDPLPLRTLAGCLARTAHLRPGAESLPQPQLHCTLWFQSSELSPTGAPWPSRRPTWRGTTVSPRTATSSARTCCGTKWPSSQEAALGLGSGLLRFSCGTAAIRKMHFSLKEHPPPPCPPEAFQRAAGEGGPGRGGARRGARVLQSPFCRAGAGEWLGHQSLRHVVGYGHLDTSGSSSSSSWPNSKMALNSLNSIDDAQLTRIAPPRSHCCFWEVNAPDGHSYTSKVNCLLLQDGFHGCVSITGAAGRRNLSIFLFLMLCKLEFHACKIQNKNCPDFKKFDGPCGERGGGRTARALWARGDSVLTPALDPQTPVRAPSLTRAAAAVHYKLIQQPISLFSITDRLHKTFSQLPSVHLCSITFQWGHPPIFCSTNDICVTANFCISVTFLKPCFLLHEASASQCHLFLQPQVGTPPPHTASARAPSGPPHPHESCPAGRRPARAAQTCARRQHGLPGCEEAGTARVPSLHLHLHQAALGAGRGRGWGEACAQVPPSRGVLRFLDLKVRYLHSQWQHYHRSGEAAGTPLWRPTRNVPFRELKNQRTAQGAPGIHHAASPVAANLCDPARHAQHTRIPCGAGQVRAGRGPEAGGGVLQPQRPAPEKPGCPCRRGQPRLHTVKMWRAVAMMVPDRQVHYDFGLQNLQNGGGSRSSATLPGRRRRRWLRRRRQPISVAPAGPPRRPNQKPNPPGGARCVIMRPTWPGTSAFTKRSFAVTERIILVLGVLSGHSGSRLYEAGMTLGGKILFFLFLLLPLSPFSLIFTEISCCTLSSEENEYLPRPEWQLQVPFRELKNVSVLEGLRQGRLGGPCSCHCPRPSQARLTPVDVAGPFLCLGDPGLFPPVKSSITGGKSTCSAPGPQSLPSTPFSTYPQWVILITELGMECTLGQVGAPSPRREEDGWRGGHSRFKADVPAPQGPCWGGQPGSAPSSAPPEQSLLDDYWAQKEKGSSSFLRPSCDYWAQKEKISIPRTHLCWKFEMSYTVGGPPPHVHARPRHWKTDR

SEQ ID NO: 624 - protein, 1507 aa, Artificial sequence
  Heterologous polypeptide
MGQKEQIHTLQKNSERMSKQLTRSSQAVGNTTLQQLGEASQAPSGSLIPLRLPLLWEVRGQPDSFAALHSSLNELGEIARELHQFAFDLLIKSHFVQGKDWGLKKFIRRDFWGMELAASRRFSWDHHSAGGPPRVPSVRSGAAQVQPKDPLPLRTLAGCLARTAHLRPGAESLPQPQLHCTLWFQSSELSPTGAPWPSRRPTWRGTTVSPRTATSSARTCCGTKWPSSQEAALGLGSGLLRFSCGTAAIRKMHFSLKEHPPPPCPPEAFQRAAGEGGPGRGGARRGARVLQSPFCRAGAGEWLGHQSLRHVVGYGHLDTSGSSSSSSWPNSKMALNSLNSIDDAQLTRIAPPRSHCCFWEVNAPGVPGDSTRRAVRRMNTFYEAGMTLGEKFRVGNCKHLKMTRPNSKMALNSEALSVVSECGASACDVSLIAMDSAFVQGKDWGVKKFIRRDFYAYKDFLWCFPFSLVFLQEIQICCHVSCLCCICCSTRICLGCLLELFLSRALRALHVLWNGFQLHCQTEYNQKLQVNQFSESKSLYHREKQLIAMDSAICEERGAAGSLISCETMPAILKLQKNCLLSLRTALTHNQDFSIYRLCCKRGSLCHASQARSPAFPKPVRPLPAPITRITPQLGGQSDSSQPLLTTGRPQGWQDQALRHTQQASPASCATITIPIHSAALGDHSGDPGPAWDTCPPLPLTTLIPRAPPPYGDSTARSWPSRCGPLGDGHSYTSKVNCLLLQDGFHGCVSITGAAGRRNLSIFLFLMLCKLEFHACKIQNKNCPDFKKFDGPCGERGGGRTARALWARGDSVLTPALDPQTPVRAPSLTRAAAAVHYKLIQQPISLFSITDRLHKTFSQLPSVHLCSITFQWGHPPIFCSTNDICVTANFCISVTFLKPCFLLHEASASQCHLFLQPQVGTPPPHTASARAPSGPPHPHESCPAGRRPARAAQTCARRQHGLPGCEEAGTARVPSLHLHLHQAALGAGRGRGWGEACAQVPPSRGVLRFLDLKVRYLHSQWQHYHRSGEAAGTPLWRPTRNVPFRELKNQRTAQGAPGIHHAASPVAANLCDPARHAQHTRIPCGAGQVRAGRGPEAGGGVLQPQRPAPEKPGCPCRRGQPRLHTVKMWRAVAMMVPDRQVHYDFGLQNLQNGGGSRSSATLPGRRRRRWLRRRRQPISVAPAGPPRRPNQKPNPPGGARCVIMRPTWPGTSAFTKRSFAVTERIITEISCCTLSSEENEYLPRPEWQLQYEAGMTLGGKILFFLFLLLPLSPFSLIFDYWAQKEKGSSSFLRPSCVPFRELKNVSVLEGLRQGRLGGPCSCHCPRPSQARLTPVDVAGPFLCLGDPGLFPPVKSSITGGKSTCSAPGPQSLPSTPFSTYPQWVILITELGMECTLGQVGAPSPRREEDGWRGGHSRFKADVPAPQGPCWGGQPGSAPSSAPPEQSLLDDYWAQKEKISIPRTHLCLVLGVLSGHSGSRLWKFEMSYTVGGPPPHVHARPRHWKTDR

SEQ ID NO: 625 - protein, 1507 aa, Artificial sequence
  Heterologous polypeptide
MGQKEQIHTLQKNSERMSKQLTRSSQAVGNTTLQQLGEASQAPSGSLIPLRLPLLWEVRGNSKMALNSLNSIDDAQLTRIAPPRSHCCFWEVNAPFVQGKDWGLKKFIRRDFEAFQRAAGEGGPGRGGARRGARVLQSPFCRAGAGEWLGHQSLRWGMELAASRRFSWDHHSAGGPPRVPSVRSGAAQVQPKDPLPLRTLAGCLARTAHLRPGAESLPQPQLHCTIARELHQFAFDLLIKSHKMHFSLKEHPPPPCPPHVVGYGHLDTSGSSSSSSWPQPDSFAALHSSLNELGELWFQSSELSPTGAPWPSRRPTWRGTTVSPRTATSSARTCCGTKWPSSQEAALGLGSGLLRFSCGTAAIRQNLQNGGGSRSSATLPGRRRRRWLRRRRQPISVAPAGPPRRPNQKPNPPGGARCVIMRPTWPGTSAFTGMECTLGQVGAPSPRREEDGWRGGHSRFKADVPAPQGPCWGGQPGSAPSSAPPEQSLLDDYWAQKEKISIPRTHLCWKFEMSYTVGGPPPHVHARPRHWKTDRDYWAQKEKGSSSFLRPSCVPFRELKNVSVLEGLRQGRLGGPCSCHCPRPSQARLTPVDVAGPFLCLGDPGLFPPVKSSITEISCCTLSSEENEYLPRPEWQLQYEAGMTLGGKILFFLFLLLPLSPFSLIFLVLGVLSGHSGSRLKRSFAVTERIITGGKSTCSAPGPQSLPSTPFSTYPQWVILITELDGHSYTSKVNCLLLQDGFHGCVSITGAAGRRNLSIFLFLMLCKLEFHACQWQHYHRSGEAAGTPLWRPTRNVAMMVPDRQVHYDFGLVLRFLDLKVRYLHSKIQNKNCPDVPFRELKNQRTAQGAPGIHHAASPVAANLCDPARHAQHTRIPCGAGQVRAGRGPEAGGGVLQPQRPAPEKPGCPCRRGQPRLHTVKMWRACHLFLQPQVGTPPPHTASARAPSGPPHPHESCPAGRRPARAAQTCARRQHGLPGCEEAGTARVPSLHLHLHQAALGAGRGRGWGEACAQVPPSRGHYKLIQQPISLFSITDRLHKTFSQLPSVHLCSITFQWGHPPIFCSTNDICVTANFCISVTFLKPCFLLHEASASQFKKFDGPCGERGGGRTARALWARGDSVLTPALDPQTPVRAPSLTRAAAAVGVPGDSTRRAVRRMNTFCGASACDVSLIAMDSACEERGAAGSLISCESLYHREKQLIAMDSAIFVQGKDWGVKKFIRRDFTMPAILKLQKNCLLSLNSKMALNSEALSVVSEYEAGMTLGEKFRVGNCKHLKMTRPTEYNQKLQVNQFSESKRTALTHNQDFSIYRLCCKRGSLCHASQARSPAFPKPVRPLPAPITRITPQLGGQSDSSQPLLTTGRPQGWQDQALRHTQQASPASCATITIPIHSAALGDHSGDPGPAWDTCPPLPLTTLIPRAPPPYGDSTARSWPSRCGPLGYAYKDFLWCFPFSLVFLQEIQICCHVSCLCCICCSTRICLGCLLELFLSRALRALHVLWNGFQLHCQ

SEQ ID NO: 626 - protein, 1507 aa, Artificial sequence
  Heterologous polypeptide
MGQKEQIHTLQKNSERMSKQLTRSSQAVDGHSYTSKVNCLLLQDGFHGCVSITGAAGRRNLSIFLFLMLCKLEFHACVPFRELKNQRTAQGAPGIHHAASPVAANLCDPARHAQHTRIPCGAGQVRAGRGPEAGGGVLQPQRPAPEKPGCPCRRGQPRLHTVKMWRAQWQHYHRSGEAAGTPLWRPTRNKIQNKNCPDVAMMVPDRQVHYDFGLVLRFLDLKVRYLHSCHLFLQPQVGTPPPHTASARAPSGPPHPHESCPAGRRPARAAQTCARRQHGLPGCEEAGTARVPSLHLHLHQAALGAGRGRGWGEACAQVPPSRGHYKLIQQPISLFSITDRLHKTFSQLPSVHLCSITFQWGHPPIFCSTNDICVTANFCISVTFLKPCFLLHEASASQFKKFDGPCGERGGGRTARALWARGDSVLTPALDPQTPVRAPSLTRAAAAVQNLQNGGGSRSSATLPGRRRRRWLRRRRQPISVAPAGPPRRPNQKPNPPGGARCVIMRPTWPGTSAFTGMECTLGQVGAPSPRREEDGWRGGHSRFKADVPAPQGPCWGGQPGSAPSSAPPEQSLLDDYWAQKEKISIPRTHLCWKFEMSYTVGGPPPHVHARPRHWKTDRDYWAQKEKGSSSFLRPSCVPFRELKNVSVLEGLRQGRLGGPCSCHCPRPSQARLTPVDVAGPFLCLGDPGLFPPVKSSITEISCCTLSSEENEYLPRPEWQLQYEAGMTLGGKILFFLFLLLPLSPFSLIFLVLGVLSGHSGSRLKRSFAVTERIITGGKSTCSAPGPQSLPSTPFSTYPQWVILITELGNTTLQQLGEASQAPSGSLIPLRLPLLWEVRGNSKMALNSLNSIDDAQLTRIAPPRSHCCFWEVNAPFVQGKDWGLKKFIRRDFEAFQRAAGEGGPGRGGARRGARVLQSPFCRAGAGEWLGHQSLRWGMELAASRRFSWDHHSAGGPPRVPSVRSGAAQVQPKDPLPLRTLAGCLARTAHLRPGAESLPQPQLHCTIARELHQFAFDLLIKSHKMHFSLKEHPPPPCPPHVVGYGHLDTSGSSSSSSWPQPDSFAALHSSLNELGELWFQSSELSPTGAPWPSRRPTWRGTTVSPRTATSSARTCCGTKWPSSQEAALGLGSGLLRFSCGTAAIRGVPGDSTRRAVRRMNTFCGASACDVSLIAMDSACEERGAAGSLISCESLYHREKQLIAMDSAIFVQGKDWGVKKFIRRDFYEAGMTLGEKFRVGNCKHLKMTRPTMPAILKLQKNCLLSLNSKMALNSEALSVVSETEYNQKLQVNQFSESKRTALTHNQDFSIYRLCCKRGSLCHASQARSPAFPKPVRPLPAPITRITPQLGGQSDSSQPLLTTGRPQGWQDQALRHTQQASPASCATITIPIHSAALGDHSGDPGPAWDTCPPLPLTTLIPRAPPPYGDSTARSWPSRCGPLGYAYKDFLWCFPFSLVFLQEIQICCHVSCLCCICCSTRICLGCLLELFLSRALRALHVLWNGFQLHCQ

SEQ ID NO: 627 - protein, 7 aa, Artificial sequence
  protein tag
SHHHHHH

SEQ ID NO: 628 - DNA, 845 bp, Artificial sequence
  Promoter
ccattgcatacgttgtatccatatcataatatgtacatttatattggctcatgtccaacattaccgccatgttgacattgattattgactagttattaatagtaatcaattacggggtcattagttcatagcccatatatggagttccgcgttacataacttacggtaaatggcccgcctggctgaccgcccaacgacccccgcccattgacgtcaataatgacgtatgttcccatagtaacgccaatagggactttccattgacgtcaatgggtggagtatttacggtaaactgcccacttggcagtacatcaagtgtatcatatgccaagtacgccccctattgacgtcaatgacggtaaatggcccgcctggcattatgcccagtacatgaccttatgggactttcctacttggcagtacatctacgtattagtcatcgctattaccatggtgatgcggttttggcagtacatcaatgggcgtggatagcggtttgactcacggggatttccaagtctccaccccattgacgtcaatgggagtttgttttggcaccaaaatcaacgggactttccaaaatgtcgtaacaactccgccccattgacgcaaatgggcggtaggcgtgtacggtgggaggtctatataagcagagctctccctatcagtgatagagatctccctatcagtgatagagatcgtcgacgagctcgtttagtgaaccgtcagatcgcctggagacgccatccacgctgttttgacctccatagaagacaccgggaccgatccagcctccgcggccgggaacggtgcattggaacgcggattccccgtgccaagagtga

SEQ ID NO: 629 - DNA, 227 bp, Artificial sequence
  polyA site
ctgtgccttctagttgccagccatctgttgtttgcccctcccccgtgccttccttgaccctggaaggtgccactcccactgtcctttcctaataaaatgaggaaattgcatcgcattgtctgagtaggtgtcattctattctggggggtggggtggggcaggacagcaagggggaggattgggaagacaatagcaggcatgctggggatgcggtgggctctatggcc

SEQ ID NO: 630 - DNA, 149 bp, Artificial sequence
  Promoter
gatcactaattccaaacccacccgctttttatagtaagtttttcacccataaataataaatacaataattaatttctcgtaaaagtagaaaatatattctaatttattgcacggtaaggaagtagaatcataaagaacagtgacggatc

SEQ ID NO: 631 - protein, 15 aa, Homo sapiens
VPFRELKNQRTAQGA

SEQ ID NO: 632 - protein, 15 aa, Homo sapiens
QRTAQGAPGIHHAAS

SEQ ID NO: 633 - protein, 15 aa, Homo sapiens
GIHHAASPVAANLCD

SEQ ID NO: 634 - protein, 15 aa, Homo sapiens
VAANLCDPARHAQHT

SEQ ID NO: 635 - protein, 15 aa, Homo sapiens
ARHAQHTRIPCGAGQ

SEQ ID NO: 636 - protein, 15 aa, Homo sapiens
IPCGAGQVRAGRGPE

SEQ ID NO: 637 - protein, 15 aa, Homo sapiens
RAGRGPEAGGGVLQP

SEQ ID NO: 638 - protein, 15 aa, Homo sapiens
GGGVLQPQRPAPEKP

SEQ ID NO: 639 - protein, 15 aa, Homo sapiens
RPAPEKPGCPCRRGQ

SEQ ID NO: 640 - protein, 15 aa, Homo sapiens
CPCRRGQPRLHTVKM

SEQ ID NO: 641 - protein, 14 aa, Homo sapiens
RGQPRLHTVKMWRA

SEQ ID NO: 642 - protein, 15 aa, Homo sapiens
CHLFLQPQVGTPPPH

SEQ ID NO: 643 - protein, 15 aa, Homo sapiens
VGTPPPHTASARAPS

SEQ ID NO: 644 - protein, 15 aa, Homo sapiens
ASARAPSGPPHPHES

SEQ ID NO: 645 - protein, 15 aa, Homo sapiens
PPHPHESCPAGRRPA

SEQ ID NO: 646 - protein, 15 aa, Homo sapiens
PAGRRPARAAQTCAR

SEQ ID NO: 647 - protein, 15 aa, Homo sapiens
AAQTCARRQHGLPGC

SEQ ID NO: 648 - protein, 15 aa, Homo sapiens
QHGLPGCEEAGTARV

SEQ ID NO: 649 - protein, 15 aa, Homo sapiens
EAGTARVPSLHLHLH

SEQ ID NO: 650 - protein, 15 aa, Homo sapiens
SLHLHLHQAALGAGR

SEQ ID NO: 651 - protein, 15 aa, Homo sapiens
AALGAGRGRGWGEAC

SEQ ID NO: 652 - protein, 15 aa, Homo sapiens
RGWGEACAQVPPSRG

SEQ ID NO: 653 - protein, 15 aa, Homo sapiens
HYKLIQQPISLFSIT

SEQ ID NO: 654 - protein, 15 aa, Homo sapiens
ISLFSITDRLHKTFS

SEQ ID NO: 655 - protein, 15 aa, Homo sapiens
RLHKTFSQLPSVHLC

SEQ ID NO: 656 - protein, 15 aa, Homo sapiens
LPSVHLCSITFQWGH

SEQ ID NO: 657 - protein, 15 aa, Homo sapiens
ITFQWGHPPIFCSTN

SEQ ID NO: 658 - protein, 15 aa, Homo sapiens
PIFCSTNDICVTANF

SEQ ID NO: 659 - protein, 15 aa, Homo sapiens
ICVTANFCISVTFLK

SEQ ID NO: 660 - protein, 15 aa, Homo sapiens
ISVTFLKPCFLLHEA

SEQ ID NO: 661 - protein, 11 aa, Homo sapiens
CFLLHEASASQ

SEQ ID NO: 662 - protein, 15 aa, Homo sapiens
RTALTHNQDFSIYRL

SEQ ID NO: 663 - protein, 15 aa, Homo sapiens
DFSIYRLCCKRGSLC

SEQ ID NO: 664 - protein, 15 aa, Homo sapiens
CKRGSLCHASQARSP

SEQ ID NO: 665 - protein, 15 aa, Homo sapiens
ASQARSPAFPKPVRP

SEQ ID NO: 666 - protein, 15 aa, Homo sapiens
FPKPVRPLPAPITRI

SEQ ID NO: 667 - protein, 15 aa, Homo sapiens
PAPITRITPQLGGQS

SEQ ID NO: 668 - protein, 15 aa, Homo sapiens
PQLGGQSDSSQPLLT

SEQ ID NO: 669 - protein, 15 aa, Homo sapiens
SSQPLLTTGRPQGWQ

SEQ ID NO: 670 - protein, 15 aa, Homo sapiens
GRPQGWQDQALRHTQ

SEQ ID NO: 671 - protein, 15 aa, Homo sapiens
QALRHTQQASPASCA

SEQ ID NO: 672 - protein, 15 aa, Homo sapiens
ASPASCATITIPIHS

SEQ ID NO: 673 - protein, 15 aa, Homo sapiens
ITIPIHSAALGDHSG

SEQ ID NO: 674 - protein, 15 aa, Homo sapiens
ALGDHSGDPGPAWDT

SEQ ID NO: 675 - protein, 15 aa, Homo sapiens
PGPAWDTCPPLPLTT

SEQ ID NO: 676 - protein, 15 aa, Homo sapiens
PPLPLTTLIPRAPPP

SEQ ID NO: 677 - protein, 15 aa, Homo sapiens
IPRAPPPYGDSTARS

SEQ ID NO: 678 - protein, 16 aa, Homo sapiens
GDSTARSWPSRCGPLG

SEQ ID NO: 679 - protein, 15 aa, Homo sapiens
YAYKDFLWCFPFSLV

SEQ ID NO: 680 - protein, 15 aa, Homo sapiens
CFPFSLVFLQEIQIC

SEQ ID NO: 681 - protein, 15 aa, Homo sapiens
LQEIQICCHVSCLCC

SEQ ID NO: 682 - protein, 15 aa, Homo sapiens
HVSCLCCICCSTRIC

SEQ ID NO: 683 - protein, 15 aa, Homo sapiens
CCSTRICLGCLLELF

SEQ ID NO: 684 - protein, 15 aa, Homo sapiens
GCLLELFLSRALRAL

SEQ ID NO: 685 - protein, 15 aa, Homo sapiens
SRALRALHVLWNGFQ

SEQ ID NO: 686 - protein, 11 aa, Homo sapiens
VLWNGFQLHCQ

SEQ ID NO: 687 - protein, 15 aa, Homo sapiens
YEAGMTLGEKFRVGN

SEQ ID NO: 688 - protein, 16 aa, Homo sapiens
EKFRVGNCKHLKMTRP

SEQ ID NO: 689 - protein, 15 aa, Homo sapiens
WGMELAASRRFSWDH

SEQ ID NO: 690 - protein, 15 aa, Homo sapiens
RRFSWDHHSAGGPPR

SEQ ID NO: 691 - protein, 15 aa, Homo sapiens
SAGGPPRVPSVRSGA

SEQ ID NO: 692 - protein, 15 aa, Homo sapiens
PSVRSGAAQVQPKDP

SEQ ID NO: 693 - protein, 15 aa, Homo sapiens
QVQPKDPLPLRTLAG

SEQ ID NO: 694 - protein, 15 aa, Homo sapiens
PLRTLAGCLARTAHL

SEQ ID NO: 695 - protein, 15 aa, Homo sapiens
LARTAHLRPGAESLP

SEQ ID NO: 696 - protein, 14 aa, Homo sapiens
PGAESLPQPQLHCT

SEQ ID NO: 697 - protein, 15 aa, Homo sapiens
NSKMALNSLNSIDDA

SEQ ID NO: 698 - protein, 15 aa, Homo sapiens
LNSIDDAQLTRIAPP

SEQ ID NO: 699 - protein, 15 aa, Homo sapiens
LTRIAPPRSHCCFWE

SEQ ID NO: 700 - protein, 15 aa, Homo sapiens
APPRSHCCFWEVNAP

SEQ ID NO: 701 - protein, 15 aa, Homo sapiens
LWFQSSELSPTGAPW

SEQ ID NO: 702 - protein, 15 aa, Homo sapiens
SPTGAPWPSRRPTWR

SEQ ID NO: 703 - protein, 15 aa, Homo sapiens
SRRPTWRGTTVSPRT

SEQ ID NO: 704 - protein, 15 aa, Homo sapiens
TTVSPRTATSSARTC

SEQ ID NO: 705 - protein, 15 aa, Homo sapiens
TSSARTCCGTKWPSS

SEQ ID NO: 706 - protein, 15 aa, Homo sapiens
GTKWPSSQEAALGLG

SEQ ID NO: 707 - protein, 15 aa, Homo sapiens
EAALGLGSGLLRFSC

SEQ ID NO: 708 - protein, 13 aa, Homo sapiens
GLLRFSCGTAAIR

SEQ ID NO: 709 - protein, 15 aa, Homo sapiens
QNLQNGGGSRSSATL

SEQ ID NO: 710 - protein, 15 aa, Homo sapiens
QWQHYHRSGEAAGTP

SEQ ID NO: 711 - protein, 14 aa, Homo sapiens
GEAAGTPLWRPTRN

SEQ ID NO: 712 - protein, 16 aa, Homo sapiens
TEYNQKLQVNQFSESK

SEQ ID NO: 713 - DNA, 32767 bp, Artificial sequence
  recombinant GAd20
catcatcaataatataccttattttggattgaggccaatatgataatgaggtgggcggggcgaggcggggcgggtgacgtaggacgcgcgagtagggttgggaggtgtggcggaagtgtggcatttgcaagtgggaggagctgacatgcaatcttccgtcgcggaaaatgtgacgtttttgatgagcgccgcctacctccggaagtgccaattttcgcgcgcttttcaccggatatcgtagtaattttgggcgggaccatgtaagatttggccattttcgcgcgaaaagtgaaacggggaagtgaaaactgaataatagggcgttagtcatagcgcgtaatatttaccgagggccgagggactttgaccgattacgtggaggactcgcccaggtgttttttacgtgaatttccgcgttccgggtcaaagtctccgtttttattgtcgccgtcatctgacgggccgccattgcatacgttgtatccatatcataatatgtacatttatattggctcatgtccaacattaccgccatgttgacattgattattgactagttattaatagtaatcaattacggggtcattagttcatagcccatatatggagttccgcgttacataacttacggtaaatggcccgcctggctgaccgcccaacgacccccgcccattgacgtcaataatgacgtatgttcccatagtaacgccaatagggactttccattgacgtcaatgggtggagtatttacggtaaactgcccacttggcagtacatcaagtgtatcatatgccaagtacgccccctattgacgtcaatgacggtaaatggcccgcctggcattatgcccagtacatgaccttatgggactttcctacttggcagtacatctacgtattagtcatcgctattaccatggtgatgcggttttggcagtacatcaatgggcgtggatagcggtttgactcacggggatttccaagtctccaccccattgacgtcaatgggagtttgttttggcaccaaaatcaacgggactttccaaaatgtcgtaacaactccgccccattgacgcaaatgggcggtaggcgtgtacggtgggaggtctatataagcagagctctccctatcagtgatagagatctccctatcagtgatagagatcgtcgacgagctcgtttagtgaaccgtcagatcgcctggagacgccatccacgctgttttgacctccatagaagacaccgggaccgatccagcctccgcggccgggaacggtgcattggaacgcggattccccgtgccaagagtgagatcttccgtttatctaggtaccagatatcagaattcggatcccgcgacttcgccgccatgggccagaaagagcagatccacacactgcagaaaaacagcgagcggatgagcaagcagctgaccagatcttctcaggccgtgcagaacctgcagaacggcggaggctctagaagctctgctacacttcctggcaggcggcggagaagatggctgagaagaaggcggcagcctatctctgtggctcctgctggacctcctagacggcccaaccagaagcctaatcctcctggcggagccagatgcgtgatcatgaggcctacatggcctggcaccagcgccttcaccaagagaagctttgccgtgaccgagcggatcatcgactattgggctcaaaaagagaagggcagcagcagcttcctgcggcctagctgtgattattgggcccagaaagaaaagatcagcatccccagaacacacctgtgcctggtgctgggagtgctgtctggacactctggcagcagactgtatgaggccggcatgacactcggcggcaagatcctgttcttcctgttcctgctgctccctctgagccccttcagcctgatcttcaccgagatcagctgctgcaccctgagcagcgaggaaaacgagtacctgcctagacctgagtggcagctgcaggtccccttcagagagctgaagaacgtttccgtgctggaaggcctgagacagggcagacttggcggcccttgtagctgtcactgccccagacctagtcaggccagactgacacctgtggatgtggccggacctttcctgtgtctgggagatcctggcctgtttccacctgtgaagtccagcatcacaggcggcaagtccacatgttctgcccctggacctcagagcctgcctagcacacccttcagcacataccctcagtgggtcatcctgatcaccgaactcggcatggaatgcaccctgggacaagtgggagccccatctcctagaagagaagaggatggctggcgcggaggccactctagattcaaagctgatgtgcccgctcctcagggcccttgttggggaggacaacctggatctgccccatcttctgccccacctgaacagtccctgctggattggaagttcgagatgagctacaccgtcggcggacctccacctcatgttcatgccagacctcggcactggaaaaccgacagagatggccacagctacaccagcaaagtgaactgcctcctgctgcaggatggcttccacggctgtgtgtctattactggcgccgctggcagacggaacctgagcatctttctgtttctgatgctgtgcaagctcgagttccacgcctgcaagatccagaacaagaactgccccgacttcaagaagttcgacggcccttgcggagaaagaggcggaggcagaacagctagagccctttgggctagaggcgacagcgttctgacaccagctctggaccctcagacacctgttagggcccctagcctgacaagagctgccgccgctgtgcactacaagctgatccagcagccaatcagcctgttcagcatcaccgaccggctgcacaagacattcagccagctgccaagcgtgcacctgtgctccatcaccttccagtggggacaccctcctatcttttgctccaccaacgacatctgcgtgaccgccaacttctgtatcagcgtgaccttcctgaagccttgctttctgctgcacgaggccagcgcctctcagtgccacttgtttctgcagccccaagtgggcacacctcctccacatacagcctctgctagagcacctagcggccctccacatcctcacgaatcttgtcctgccggaagaaggcctgccagagccgctcaaacatgtgccagacgacagcacggactgcctggatgtgaagaggctggaacagccagagtgcctagcctgcacctccatctgcatcaggctgctcttggagccggaagaggtagaggatggggcgaagcttgtgctcaggtgccaccttctagaggcgtgctgagattcctggacctgaaagtgcgctacctgcacagccagtggcagcactatcacagatctggcgaagccgccggaacacccctttggaggccaacaagaaacgtgcccttccgggaactgaagaaccagagaacagctcagggcgctcctggaatccaccatgctgcttctccagtggccgccaacctgtgtgatcctgccagacatgcccagcacaccaggattccttgtggcgctggacaagtgcgcgctggaagaggacctgaagcaggcggaggtgttctgcaacctcaaagacccgctcctgagaagcctggctgcccttgcagaagaggacagcctagactgcacaccgtgaaaatgtggcgagccgtggccatgatggtgcccgatagacaggtccactacgactttggactgggcgtgccaggcgatagcactcggagagccgtcagacggatgaacaccttttacgaagccgggatgaccctgggcgagaagttcagagtgggcaactgcaagcacctgaagatgacccggcctaacagcaagatggccctgaatagcgaggccctgtctgtggtgtctgaatgtggcgcctctgcctgtgacgtgtccctgatcgctatggactccgcctttgtgcagggcaaagactggggcgtgaagaagttcatccggcgggacttctacgcctacaaggacttcctgtggtgcttccccttctctctggtgttcctgcaagagatccagatctgctgtcatgtgtcctgcctgtgctgcatctgctgtagcaccagaatctgcctgggctgtctgctggaactgttcctgagcagagccctgagagcactgcacgtgctgtggaacggattccagctgcactgccagaccgagtacaaccagaaactgcaagtgaaccagttcagcgagagcaagagcctgtaccaccgggaaaagcagctcattgccatggacagcgccatctgcgaagagagaggcgccgcaggatctctgatctcctgcgaaacaatgcccgccatcctgaagctgcagaagaattgcctcctaagcctgcgaaccgctctgacacacaaccaggacttcagcatctacagactgtgttgcaagcggggctccctgtgccatgcaagccaagctagaagccccgcctttcctaaacctgtgcgacctctgccagctccaatcaccagaattacccctcagctcggcggccagagcgattcatctcaacctctgctgaccaccggcagacctcaaggctggcaagaccaagctctgagacacacccagcaggctagccctgcctcttgtgccaccatcacaatccccatccactctgccgctctgggcgatcattctggcgatcctggaccagcctgggacacatgtcctccactgccactcacaacactgatccctagggctcctccaccttacggcgattctaccgctagaagctggcccagcagatgtggaccactcggaggcaacacaaccctccagcaactgggagaagcctctcaggctcctagcggctctctgatccctctcagactgcctctcctgtgggaagttcggggccagcctgattcttttgccgcactgcacagctccctgaacgagctgggagagatcgctagagagctgcaccagttcgccttcgacctgctgatcaagagccacttcgtgcaaggcaaggattggggcctcaaaaagtttatccgcagagacttctggggcatggaactggccgccagcagaagattcagctgggatcatcatagcgcaggcggcccacctagagtgccatctgttagaagcggagctgcccaggtgcagcctaaagatcctctgccactgagaacactggccggctgccttgctagaacagcccatcttagacctggcgccgagtctctgcctcagccacaactgcactgtaccctgtggttccagtccagcgagctgtctcctactggtgccccttggccatctagacgccctacttggagaggcaccaccgtgtcaccaagaaccgccacaagcagcgccagaacctgttgtggcacaaagtggccctccagccaagaagccgctctcggacttggaagcggactgctgaggttctcttgtggaaccgccgccattcggaagatgcactttagcctgaaagaacaccctccaccaccttgtcctccagaggctttccaaagagctgctggcgaaggcggacctggtagaggtggtgctagaagaggtgctagggtgctgcagagcccattctgtagagcaggcgcaggcgaatggctgggccatcagagtctgagacatgtcgtcggctacggccacctggatacaagcggaagcagctctagctccagctggcctaactcaaaaatggctctgaacagcctgaactccatcgacgacgcccagctgacaagaatcgcccctcctagatctcactgctgcttttgggaagtgaacgccccaagccatcaccatcaccaccattagtaaaggcgcgcctagcggccgcgatctgctgtgccttctagttgccagccatctgttgtttgcccctcccccgtgccttccttgaccctggaaggtgccactcccactgtcctttcctaataaaatgaggaaattgcatcgcattgtctgagtaggtgtcattctattctggggggtggggtggggcaggacagcaagggggaggattgggaagacaatagcaggcatgctggggatgcggtgggctctatggccgggccgcgatcgcgcttaggcctgaccatctggtgctggcctgcaccagggccgagtttgggtctagcgatgaggataccgattgaggtgggtaaggtgggcgtggctagcagggtgggcgtgtataaattgggggtctaaggggtctctctgtttgtcttgcaacagccgccgccatgagcgacaccggcaacagctttgatggaagcatctttagtccctatctgacagtgcgcatgcctcactgggccggagtgcgtcagaatgtgatgggttccaacgtggatggacgtcccgttctgccttcaaattcgtctactatggcctacgcgaccgtgggaggaactccgctggacgccgcgacctccgccgccgcctccgccgccgccgcgaccgcgcgcagcatggctacggacctttacagctctttggtggcgagcagcgcggcctctcgcgcgtctgctcgggatgagaaactgactgctctgctgcttaaactggaagacttgacccgggagctgggtcaactgacccagcaggtttccagcttgcgtgagagcagccttgcctccccctaatggcccataatataaataaaagccagtctgtttggattaagcaagtgtatgttctttatttaactctccgcgcgcggtaagcccgggaccagcggtctcggtcgtttagggtgcggtggattttttccaacacgtggtacaggtggctctggatgtttagatacatgggcatgagtccatccctggggtggaggtagcaccactgcagagcttcgtgctcgggggtggtgttgtatatgatccagtcgtagcaggagcgctgggcgtggtgctgaaaaatgtccttaagcaagaggcttatagctagggggaggcccttggtgtaagtgtttacaaatctgcttagctgggaggggtgcatccggggggatatgatgtgcatcttggactggatttttaggttggctatgttcccgcccagatcccttctgggattcatgttgtgcaggaccaccagcacggtatatccagtgcacttgggaaatttatcgtggagcttagacgggaatgcatggaagaacttggagacgcccttgtggcctcccagattttccatacattcgtccatgatgatggcaatgggcccgtgggaagctgcctgagcaaaaacgtttctggcatcgctcacatcgtagttatgttccagggtgaggtcatcataggacatctttacgaatcgggggcgaagggtcccggactgggggatgatggtaccctcgggccccggggcgtagttcccctcacagatctgcatctcccaggctttcatttcagagggagggatcatatccacctgcggggcgatgaaaaagacagtttctggcgcaggggagattaactgggatgagagcaggtttctgagcagctgtgactttccacagccggtgggcccatatatcacgcctatcaccggctgcagctggtagttaagagagctgcagctgccgtcctcccggagcaggggggccacctcgttgagcatatccctgacgtggatgttctccctgaccagttccgccagaaggcgctcgccgcccagcgaaagcagctcttgcaaggaagcaaaatttttcagcggtttcaggccatcggccgtgggcatgtttttcagcgtctgggtcagcagctccagcctgtcccagagctcggtgatgtgctctacggcatctcgatccagcagatctcctcgtttcgcgggttggggcggctttcgctgtagggcaccagccgatgggcgtccagcggggccagagtcatgtccttccatgggcgcagggtcctcgtcagggtggtctgggtcacggtgaaggggtgcgctccgggttgggcactggccagggtgcgcttgaggctggttctgctggtgctgaatcgctgccgctcttcgccctgcgcgtcggccaggtagcatttgaccatggtctcgtagtcgagaccctcggcggcgtgccccttggcgcggagctttcccttggaggtggcgccgcacgaggggcactgcaggctcttcagggcgtagagcttgggagcgagaaacacggactctggggagtaggcgtccgcgccgcaggccgagcagaccgtctcgcattccaccagccaagtgagttccgggcggtcagggtcaaaaaccaggttgcccccatgctttttgatgcgtttcttaccttggctctccatgaggcggtgtcccttctcggtgacgaagaggctgtccgtgtccccgtagaccgacttcaggggcctgtcttccagcggagtgcctctgtcctcctcgtagagaaactctgaccactctgagacgaaggcccgcgtccaggccaggacgaaggaggccacgtgggaggggtagcggtcgttgtccactagcgggtccaccttctccagggtgtgcaggcacatgtccccctcctccgcgtccagaaaagtgattggcttgtaggtgtaggacacgtgaccgggggttcccaacgggggggtataaaagggggtgggtgccctttcatcttcactctcttccgcatcgctgtctgcgagagccagctgctggggtaagtattccctctcgaaggcgggcatgacctcagcgctcaggttgtcagtttctaaaaatgaggaggatttgatgttcacctgtccggaggtgatacctttgagggtacctgggtccatctggtcagaaaacactatttttttgttatcaagcttggtggcgaatgacccgtagagggcgttggagagcagcttggcgatggagcgcagggtctggtttttgtcgcggtcggctcgctccttggccgcgatgttgagttgcacgtactcgcgggccacgcacttccactcggggaacacggtggtgcgctcgtctgggatcaggcgcaccctccagccgcggttgtgcagggtgaccatgtcgacgctggtggcgacctcaccgcgcagacgctcgttggtccagcagaggcggccgcccttgcgcgagcagaaggggggtagggggtccagctggtcctcgtttggggggtccgcgtcgatggtaaagaccccggggagcaggcgcgggtcaaagtagtcgatcttgcaagcttgcatgtccagagcccgctgccattcgcgggcggcgagcgcgcgctcgtaggggttgaggggcgggccccagggcatggggtgggtgagcgcggaggcgtacatgccgcagatgtcatacacgtacaggggttccctgaggataccgaggtaggtggggtagcagcgccccccgcggatgctggcgcgcacgtagtcatagagctcgtgggagggggccagcatgttgggcccgaggttggtgcgctgggggcgctcggcgcggaagacgatctgcctgaagatggcgtgggagttggaggagatggtgggccgctggaagacgttgaagcttgcttcttgcaagcccacggagtccctgacgaaggaggcgtaggactcgcgcagcttgtgcaccagctcggcggtgacctggacgtcgagcgcacagtagtcgagggtctcgcggatgatgtcatacctatcctcccccttctttttccacagctcgcggttgaggacgaactcttcgcggtctttccagtactcttggaggggaaacccgtccgtgtccgaacggtaagagcctagcatgtagaactggttgacggcctggtaggggcagcagcccttctccacgggcagcgcgtaggcctgcgccgccttgcggagggaggtgtgggtgagggcgaaagtgtccctgaccatgactttgaggtattgatgtctgaagtctgtgtcatcgcagccgccctgttcccacagggtgtagtccgtgcgctttttggagcgcgggttgggcagggagaaggtgaggtcattgaagaggatcttccccgctcgaggcatgaagtttctggtgatgcgaaagggccctgggaccgaggagcggttgttgatgacctgggcggccaggacgatctcgtcaaagccgtttatgttgtgtcccacgatgtagagctccaggaagcggggctggcccttgatggaggggagctttttaagttcctcgtaggtaagctcctcgggcgattccaggccgtgctcctccagggcccagtcttgcaagtgagggttggccgccaggaaggatcgccagaggtcgcgggccatgagggtctgcaggcggtcgcggaaggttctgaactgccgccccacggccattttttcgggggtgatgcagtagaaggtgagggggtctttctcccaggggtcccatctgagctctcgggcgaggtcgcgcgcggcagcgaccagagcctcgtcgccccccagtttcatgaccagcatgaagggcacgagttgcttgccaaaggctcccatccaagtgtaggtttctacatcgtaggtgacaaagaggcgctccgtgcgaggatgagagccgattgggaagaactggatctcccgccaccagttggaggattggctgttgatgtggtgaaagtagaagtcccgtctgcgggccgagcactcgtgctggcttttgtaaaagcgaccgcagtactggcagcgctgcacgggttgtatatcttgcacgaggtgaacctggcgacctctgacgaggaagcgcagcgggaatctaagtcccccgcctggggtcccgtgtggctggtggtcttttactttggttgtctggccgccagcatctgtctcctggagggcgatggtggaacagaccaccacgccgcgagagccgcaggtccagatctcggcgctcggcgggcggagtttgatgacgacatcgcgcacattggagctgtccatggtctccagctcccgcggcggcaggtcagccgggagttccctggaggttcacctcgcagagacgggtcaaggcgcggacagtgttgagatggtatctgatttcaaggggcatgttggaggcggagtcgatggcttgcaggaggccgcagccccggggggccacgatggttccccgcggggcgcgaggggaggcggaagctgggggtgtgttcagaagcggtgacgcgggcgggcccccggaggtagggggggttccggccccacaggcatgggcggcaggggcacgtcttcgccgcgcgcgggcaggggctggtgctggctccgaagagcgcttgcgtgcgcgacgacgcgacggttggtgttcctgtatctggcgcctctgagtgaagaccacgggtcccgtgaccttgaacctgaaagagagttcgacagaatcaatctcggcatcgttgacagcggcctggcgcaggatctcctgcacgtcgcccgagttgtcctggtaggcgatttctgccatgaactgctcgatctcttcctcctggagatctcctcgtccggcgcgctccacggtggccgccaggtcgttggagatgcgacccatgagctgcgagaaggcgttgagtccgccctcgttccagacccggctgtagaccacgcccccctcggcgtcgcgggcgcgcatgaccacctgggccaggttgagctccacgtgtcgcgtgaagacggcgtagttgcgcaggcgctggaaaaggtagttcagggtggtggcggtgtgctcggcgacgaagaagtacatgacccagcgccgcaacgtggattcattgatgtcccccaaggcctccaggcgctccatggcctcgtagaagtccacggcgaagttgaaaaactgggagttgcgagcggacacggtcaactcctcctccagaagaacggatgagctcggcgacagtgtcgcgcacctcgcgctcgaaggccacggggggcgcttcttcctcttccacctcttcttccatgattgcttcttcttcttcctcagccgggacgggagggggcggcggcgggggaggggcgcggcggcggcggcggcgcaccgggaggcggtcgatgaagcgctcgatcatctccccccgcatgcggcgcatggtctcggtgacggcgcggccgttctcccgggggcgcagctcgaagacgccgcctctcatttcgccgcggggcgggcggccgtgaggtagcgagacggcgctgactatgcatcttaacaattgctgtgtaggtacgccgccaagggacctgattgagtccagatccaccggatccgaaaacctttggaggaaagcgtctatccagtcgcagtcgcaaggtaggctgagcaccgtggcgggcgggggcgggtcgggagagttcctggcggagatgctgctgatgatgtaattaaagtaggcggtcttgagaaggcggatggtggacaggagcaccatgtctttgggtccggcctgttggatgcggaggcggtcggccatgccccaggcctcgttctgacaccggcgcaggtctttgtagtaatcttgcatgagtctttccaccggcacttcttctccttcctcttcttcatctcgccggtggtttctcgcgccgcccatgcgcgtgaccccaaagcccctgagcggctgcagcagggccaggtcggcgaccacgcgctcggccaagatggcctgctgtacctgagtgagggtcctctcgaagtcatccatgtccacgaagcggtggtaggcacccgtgttgatggtgtaggtgcagttggccatgacggaccagttgacggtctggtgtcccggctgcgagagctccgtgtaccgcaggcgcgagaaggcgcgggaatcgaacacgtagtcgttgcaagtccgcaccagatactggtagcccaccaggaagtgcggcggaggttggcgatagaggggccagcgctgggtggcgggggcgccgggcgccaggtcttccagcatgaggcggtggtatccgtagatgtacctggacatccaggtgatgcctgcggcggtggtggtggcgcgcgcgtagtcgcggacccggttccagatgtttcgcaggggcgagaagtgttccatggtcggcacgctctggccggtgaggcgcgcgcagtcgttgacgctctatacacacacaaaaacgaaagcgtttacagggctttcgttctgtagcctggaggaaagtaaatgggttgggttgcggtgtgccccggttcgagaccaagctgagctcagccggctgaagccgcagctaacgtggtattggcagtcccgtctcgacccaggccctgtatcctccaggatacggtcgagagcccttttgctttcttggccaagcgcccgtggcgcgatctgggatagatggtcgcgatgagaggacaaaagcggctcgcttccgtagtctggagaaacaatcgccagggttgcgttgcggcgtaccccggttcgagcccctatggcggcttggatcggccggaaccgcggctaacgtgggctgtggcagccccgtcctcaggaccccgccagccgacttctccagttacgggagcgagccccttttgtttttttattttttagatgcatcccgtgctgcggcagatgcgcccctcgccccggcccgatcagcagcagcaacagcaggcatgcagacccccctctcctctccccgccccggtcaccacggccgcggcggccgtgtccggtgcggggggcgcgctggagtcagatgagccaccgcggcggcgacctaggcagtatctggacttggaagagggcgagggactggcgcggctgggggcgagctctccagagcgccacccgcgggtgcagttgaaaagggacgcgcgtgaggcgtacctgccgcggcaaaacctgtttcgcgaccgcgggggcgaggagcccgaggagatgcgggactgcaggttccaagcggggcgcgagctgcgccgcggcttggacagacagcgcctgctgcgcgaggaggactttgagcccgacacgcagacgggcatcagccccgcgcgcgcgcacgtggccgcggccgacctggtgaccgcctacgagcagacggtgaaccaggagcgcaacttccaaaaaagcttcaacaaccacgtgcgcacgctggtggcgcgcgaggaggtgaccctgggtctcatgcatctgtgggacctggtggaggcgatcgtgcagaaccccagcagcaagcccctgaccgcgcagctgttcctggtggtgcagcacagcagggacaacgaggccttcagggaggcgctgctgaacatcaccgagccggaggggcgctggctcctggacctgataaacatcctgcagagcatagtggtgcaggagcgcagcctgagcctggccgagaaggtggcggccattaactattctatgctgagcctgggcaagttctacgctcgcaagatctacaagaccccctacgtgcccatagacaaggaggtgaagatagacagcttctacatgcgcatggcgctgaaggtgctaaccctgagcgacgacctgggagtgtaccgcaacgagcgcatccacaaggccgtgagcgccagccggcggcgcgagctgagcgaccgcgaactgatgcacagtctgcagcgcgcgctgaccggcgcgggcgagggcgacagggaggtcgagtcctactttgacatgggggccgacctgcactggcagccgagccgccgcgccctggaagcggcgggggcgtacggcggccccctggcggccgatgacgaggaagaggaggactatgagctagaggagggcgagtacctggaggactgacctggctggtggtgttttggtatagatgcaagatccgaacgtggcggacccggcggtccgggcggcgctgcagagccagccgtccggcattaactcctctgacgactgggccgcggccatgggtcgcatcatggccctgaccgcgcgcaaccccgaggccttcaggcagcagcctcaggctaaccggctggcggccatcttggaagcggtagtgcccgcgcgctccaaccccacccacgagaaggtgctggccatagtcaacgcgctggcggagagcagggccatccgggcagacgaggccggactggtgtacgatgcgctgctgcagcgggtggcgcggtacaacagcggcaacgtgcagaccaacctggaccgcctggtgacggacgtgcgcgaggccgtggcgcagcgcgagcgcttgcatcaggacggcaacctgggctcgctggtggcgctaaacgccttccttagcacccagccggccaacgtaccgcgggggcaggaggactacaccaacttcttgagcgcgctgcggctgatggtgaccgaggtccctcagagcgaggtgtaccagtcggggcccgactacttcttccagaccagcagacagggcttgcaaaccgtgaacctgagccaggctttcaagaacctgcgggggctgtggggagtgaaggcgcccaccggcgaccgggctacggtgtccagcctgctaacccccaactcgcgcctgctgctgctgctgatcgcgcccttcacggacagcgggagcgtctcgcgggagacctatctgggccacctgctgacgctgtaccgcgaggccatcgggcaggcgcaggtggacgagcacaccttccaggagatcaccagcgtgagccacgcgctggggcaggaggacacgggcagcctgcaggcgaccctgaactacctgctgaccaacaggcggcagaagattcccacgctgcacagcctgacccaggaggaggagcgcatcttgcgctacgtgcagcagagcgtgagcctgaacctgatgcgcgacggcgtgacgcccagcgtggcgctggacatgaccgcgcgcaacatggaaccgggcatgtacgcttcccagcggccgttcatcaaccgcctgatggactacttgcatcgggcggcggccgtgaaccccgagtacttcaccaatgccattctgaatccccactggatgccccctccgggtttctacaacggggacttcgaggtgcctgaggtcaacgatgggttcctctgggatgacatggatgacagtgtgttctcccccaacccgctgcgcgccgcgtctctgcgattgaaggagggctctgacagggaaggaccaaggagtctggcctcctccctggctctgggggcggtgggcgccacgggcgcggcggcgcggggcagcagccccttccccagcctggcggactctctgaatagcgggcgggtgagcaggccccgcttgctaggcgaggaggagtatctgaacaactccctgctgcagcccgtgagggacaaaaacgctcagcggcagcagtttcccaacaatgggatagagagcctggtggacaagatgtccagatggaagacgtatgcgcaggagtacaaggagtgggaggaccgccagccgcggcccctgccgccccctagacagcgctggcagcggcgcgcgtccaaccgccgctggaggcaggggcccgaggacgatgatgactctgcagatgacagcagcgtgttggacctgggcgggagcgggaaccccttttcgcacctgcgcccacgcctgggcaagatgttttaaaagagaaaaataaaaactcaccaaggccatggcgacgagcgttggttttttgttcccttccttagtatgcggcgcgcggcgatgttcgaggaggggcctcccccctcttacgagagcgcgatgggaatttctcctgcggcgcccctgcagcctccctacgtgcctcctcggtacctgcaacctacaggggggagaaatagcatctgttactctgagctgcagcccctgtacgataccaccagactgtacctggtggacaacaagtccgcggacgtggcctccctgaactaccagaacgaccacagcgattttttgaccacggtgatccaaaacaacgacttcaccccaaccgaggccagtacccagaccataaacctggacaacaggtcgaactggggcggcgacctgaagactatcctgcacaccaatatgcccaacgtgaacgagttcatgttcaccaactcttttaaggcgcgggtgatggtggcgcgcgagcagggggaggcgaagtacgagtgggtggacttcacgctgcccgagggcaactactcagagaccatgactctcgacctgatgaacaatgcgatcgtggaacactatctgaaagtgggcaggcagaacggggtgaaggagagcgatatcggggtcaagtttgacaccagaaacttccgtctgggctgggaccctgtgaccgggctggtcatgccgggggtctacaccaacgaggcctttcatcccgatatagtgctcctgcccggctgtggggtggacttcacccagagccggctgagcaacctgctgggcgttcgcaagcggcaacctttccaggagggtttcaagatcacctatgaggatctggaggggggcaacattcccgcgctccttgatctggacgcctacgaggagagcttgaaacccgaggagagcgctggcgacagcggcgagagtggcgaggagcaagccggcggcggcggcagcgcgtcggtagaaaacgaaagtactcccgcagtggcggcggacgctgcggaggtcgagccggaggccatgcagcaggacgcagaggagggcgcgcaggaggacatgaacaatggggagatcaggggcgacactttcgccacccggggcgaagaaaaagaggcagaggcggcggcggcgacggcggaagccgaaaccgaggcagaggcagagcccgagaccgaagttatggaagacatgaatgatggagaacgtaggggtgacacgtttgccacccggggcgaagagaaggcggcggaggcagaagccgcggctgaggaggcggctgcggctgcggccaaggctgaggctgcggctgaggctaaggtcgaagccgatgttgcggttgaggctcaggctgaggaggaggcggcggctgaagcagttaaggaaaaggcccaggcagagcaggaagagaaaaaacctgtcattcaacctctaaaagaagatagcaaaaagcgcagttacaacgtcattgagggcagcacctttacccaataccgcagctggtacctggcttacaactacggcgacccggtcaagggggtgcgctcgtggaccctgctctgcacgccggacgtcacctgcggctccgagcagatgtactggtcgctgccaaacatgatgcaagacccggtgaccttccgttccacgcggcaggttagcaactttccggtggtgggcgccgaactgctgccagtacactccaagagtttttacaacgagcaggccgtctactcccagctgatccgccaggccacctctctgacccacgtgttcaatcgctttcccgagaaccagattttggcgcgcccgccggcccccaccatcaccaccgtcagtgaaaacgttcctgccctcacagatcacgggacgctaccgctgcgcaacagcatctcaggagtccagcgagtgaccattactgacgccagacgccggacctgcccctacgtttacaaggccttgggcatagtctcgccgcgcgtcctctccagtcgcactttttaaaacacatccacccacacgctccaaaatcatgtccgtactcatctcgcccagcaacaacaccggctgggggctgcgcgcacccagcaagatgtttggaggggcaaggaagcgctccgaccagcaccccgtgcgcgtgcgcggccactaccgcgcgccctggggtgcgcacaagcgcgggcgcacagggcgcaccactgtggatgatgtcattgactccgtagtggagcaggcgcgccactacacacccggcgcgccgaccgcctccgccgtgtccaccgtggaccaggcgatcgaaagcgtggtacagggggcgcggcactatgccaaccttaaaagtcgccgccgccgcgtggcgcgccgccatcgccggagaccccgggctactgccgccgcgcgccttaccaaggctctgctcaagcgcgccaggcgaactggccaccgggccgccatgagggccgcacggcgggctgccgctgccgcgagcgccgtggccccgcgggcacgaaggcgcgcggccgctgccgccgccgccgccatttccagcttggcctcgacgcggcgcggtaacatatactgggtgcgcgactcggtgagcggcacacgtgtgcccgtgcgctttcgccccccacggaattagcacaagacaacatacacactgagtctcctgctgttgtgtatcccagcggcgaccgtcagcagcggcgacatgtccaagcgcaaaattaaagaagagatgctccaggtcatcgcgccggagatctatgggcccccgaagaaggaggaggaggattacaagccccgcaagctaaagcgggtcaaaaagaaaaagaaagatgatgacgttgacgaggcggtggagtttgtccgccgcatggcgcccaggcgccctgtgcagtggaagggtcggcgcgtgcagcgagtcctgcgccccggcaccgcggtggtctttacgcccggcgagcgttccacgcgcactttcaagcgggtgtacgatgaggtgtacggcgacgaggatctgttggagcaggccaaccatcgatttggggagtttgcatatgggaaacggcctcgcgagagtctaaaagaggacctgctggcgctaccgctggacgagggcaatcccaccccgagtctgaagccggtgaccctgcaacaggtgctgcctttgagcgcgcccagcgagcagaagcgagggttaaagcgcgagggcggggacctggcacccaccgtgcagttgatggtgcccaagcggcagaagctggaggacgtgctggagaaaatgaaagtagagcccgggatccagcccgagatcaaggtccgccctatcaagcaggtggcgcccggcgtgggagtccagaccgtggacgttaggattcccacggaggagatggaaacccaaaccgccactccctcttcggcagcaagcgccaccaccggcgccgcttcggtagaggtgcagacggacccctggctacccgccgccactatcgccgtcgccgccgccccccgttcgcgcggacgcaagagaaattatccagcggccagcgcgcttatgccccagtatgcgctgcatccatccatcgcgcccacccccggctaccgcgggtactcgtaccgcccgcgcagatcagccggcactcgcggccgccgccgccgtgcgaccacaaccagccgccgccgtcgccgccgccgccagccagtgctgacccccgtgtctgtaaggaaggtggctcgctcggggagcacgctggtggtgcccagagcgcgctaccaccccagcatcgtttaaagccggtctctgtatggttcttgcagatatggccctcacttgtcgccttcgcttcccggtgccgggataccgaggaagaactcaccgccgcaggggcatggcgggcagcggtctccgcggcggccgtcgccatcgccggcgcgcaaagagcaggcgcatgcgcggcggtgtgttgcccctgctggtcccgctactcgccgcggcgatcggcgccgtgcccgggatcgcctccgtggccctgcaggcgtcccagaaacattgactcttgcaaccttgcaagcttgcatttttggaggaaaaaataaaaaagtctagactctcacgctcgcttggtcctgtgactattttgtagaaaaaagatggaagacatcaactttgcgtcgctggccccgcgtcacggctcgcgcccgttcatgggagactggacagatatcggcaccagcaatatgagcggtggcgccttcagctggggcagtctgtggagcggccttaaaaattttggttccaccattaagaactatggcaacaaagcgtggaacagcagcacgggtcagatgctgagagacaagttgaaagagcagaacttccaggagaaggtggcgcagggcctggcctctggcatcagcggggtggtggacatagctaaccaggccgtgcagaaaaagataaacagtcatctggacccccgccctcaggtggaggaaacgcctccagccatggagacggtgtctcccgagggcaaaggcgaaaagcgcccgcggcccgacagggaagagaccctggtgtcacacaccgaggagccgccctcttacgaggaggcagtcaaggccggcctgcccaccactcgccccatagctcccatggccaccggtgtggtgggtcacaggcaacacacccccgcaacactagatctgcccccgccgtccgagccgactcgccagccaaaggcggtgacggtgtccgctccctccacttccgccgccaacagagtgcctctgcgccgcgctgcgagcggcccccgggcctcgcgagtcagcggcaactggcagagcacactgaacagcatcgtgggcctgggagtgaggagtgtgaagcgccgccgttgctactgaatgagcaagctagctaacgtgttgtatgtgtgtatgcgtcctatgtcgccgccagaggagctgttgagccgccggcgccgtctgcactccagcgaatttcaagatggcgaccccatcgatgatgcctcagtggtcgtacatgcacatctcgggccaggacgcttcggagtacctgagccccgggctggtgcagttcgcccgcgccacagacacctacttcaacatgagtaacaagttcaggaaccccactgtggcgcccacccacgatgtgaccacggaccggtcgcagcgcctgacgctgcggttcatccccgtggatcgggaggacaccgcttactcttacaaggcgcggttcacgctggccgtgggcgacaaccgcgtgctggacatggcctccacttactttgacatccggggggtgctggacaggggccccacttttaagccctactcgggcactgcctacaaccccctggcccccaagggcgcccccaattcttgtgagtgggaacaagaggaaaatcaggtggtcgctgcagatgatgaacttgaagatgaagaagcgcaagcacaagaggaagcccctgtgaaaaaaattcatgtatatgctcaggcgcctctttctggcgaaaagatttccaaggatggtatccaaataggtactgaagtcgtaggagatacatctaaggacacttttgcagataaaacattccaacccgaacctcagataggcgagtctcagtggaacgaggctgatgccacagcagcaggaggtagagttttgaaaaagactacccctatgagaccttgctatggatcctatgccaggcctaccaatgccaacgggggtcaaggaattatggttgccaatgaacaaggagtgttggagtctaaagtagaaatgcaatttttctctaacaccacaacccttaatgcgcgggatggaaccggcaatcccgaaccaaaggtggtgttgtacagcgaagatgtccacttggaatctcccgatactcatctgtcttacaagcccaaaaaggatgatgttaatgccaaaatcatgttgggtcagcaagccatgcccaacagacccaacctcattggatttagagataatttcattgggcttatgttttacaacagcaccggtaacatgggagtgctggcgggtcaggcctctcagttgaatgctgtggtggacttgcaggatagaaacacagaactgtcatatcagcttctgcttgattcaattggggatagaaccagatacttctccatgtggaaccaggcagtggatagctatgatccagatgtcagaattattgaaaaccatgggactgaggatgaactgcccaactactgcttccctttgggcggcataggagttactgatacttatcaagggataaaaaataccaatggcaatggtcagtggaccaaagatgatcagttcgcggaccgcaacgaaataggggtgggaaacaacttcgccatggagatcaacatccaggccaacctttggagaaacttcctctatgcaaacgtggggctctacctgccagacaagctcaagtacaaccccaccaacgtggacatctctgacaaccccaacacctatgactacatgaacaagcgggtggtggcccctggcctggtggactgctttgtcaatgtgggagccaggtggtccctggactacatggacaacgtcaaccccttcaaccaccaccgcaatgcgggtctgcgctaccgctccatgatcctgggcaacgggcgctatgtgccctttcacatccaggtaccccagaagttctttgccatcaagaacctcctgctcctgcccggctcctacacctacgagtggaacttcaggaaggatgtgaacatggtcctacagagctctctgggcaatgaccttagggtggatggggccagcatcaagtttgacagcatcaccctctatgctacatttttccccatggcccacaacaccgcctccacgcttgaggccatgctgagaaacgacaccaacgaccagtcctttaatgactacctctctggggccaacatgctctacccaatcccagccaaggccaccaacgtgcccatctccatcccctctcgcaactgggccgcctttagaggctgggcctttacccgccttaagaccaaggagaccccctccctgggctcgggttttgatccctactttgtttactcgggatccatcccctacctggatggcaccttctacctcaaccacactttcaagaagatatccatcatgtatgactcctccgtcagctggccgggcaacgaccgcttgctcacccccaatgagttcgaggtcaagcgcgccgtggacggcgagggctacaacgtggcccagtgcaacatgaccaaggactggttcctggtgcagatgctggccaactacaacataggctaccagggcttttacatcccagagagctacaaggacaggatgtactccttcttcagaaatttccaacccatgagccgacaggtggtggacgagaccaattacaaggactatcaagccattggcatcacccaccagcacaacaactcgggtttcgtgggctacctggcgcccaccatgcgcgagggtcaggcctaccccgccaacttcccctaccccttgataggcaagaccgcggtcgacagcgtcacccagaaaaagttcctctgcgaccgcaccctctggcgcatccccttctctagcaacttcatgtccatgggtgcgctcacggacctgggccaaaacctgctttatgccaactctgcccatgcgctggacatgacttttgaggtggaccccatggacgagcccacccttctctatattgtgtttgaagtgttcgacgtggtcagagtgcaccagccgcaccgcggtgtcatcgagaccgtgtacctgcgtacgcccttctcagccggcaacgccaccacctaaggagacagcgccgccgccgcctgcatgacgggttccaccgagcaagagctcagggccattgccagagacctgggatgcggaccctattttttgggcacctatgacaaacgcttcccgggctttatctcccgagacaagctcgcctgcgccattgtcaacacggccgcgcgcgagaccgggggcgtgcactggctggcctttggctgggacccgcgctccaaaacttgctacctctttgacccctttggcttctccgatcagcgcctcaggcagatttatgagtttgagtacgaggggctgctgcgccgcagcgcgctcgcctcctcgcccgaccgctgcatcacccttgagaagtccaccgaaaccgtgcaggggccccactcggccgcctgcggtctcttctgttgcatgtttttgcacgcctttgtgcactggcctcagagtcccatggattgcaaccccaccatgaacttgctaaagggagtgcccaacgccatgctccagagcccccaggtccagcccaccctgcgccgcaaccaggaacagctttaccgcttcctggagcgccactccccctacttccgcagccacagcgcgcgcatccggggggccacctctttttgccacttgcaagaaaacatgcaagacggaaaatgatgtacagcatgcttttaataaatgtaaagactgtgcactttaattatacacgggctctttctggttatttattcaacaccgccgtcgccatttagaaatcgaaagggttctgccgtgcgtcgccgtgcgccacgggcagagacacgttgcgatactggaagcggctcgcccacttgaactcgggcaccaccatgcggggcagtggttcctcggggaagttctcgctccacagggtgcgggtcagctgcagcgcgctcaggaggtcgggagccgagatcttgaagtcgcagttggggccggaaccctgcgcgcgcgagttgcggtacacggggttgcagcactggaacaccagcagggccggattattcacgctggccagcaggctctcgtcgctgatcatgtcgctgtccagatcctccgcgttgctcagggcgaatggggtcatcttgcagacctgcctgcccaggaaaggcgggagcccaggcttgccgttgcagtcgcagcgcaggggcattagcaggtgcccacggcccgactgcgcctgcgggtacaacgcgcgcatgaaggcttcgatctgcctaaaagccacctgggtcttggctccctccgaaaagaacatcccacaggacttgctggagaactggttcgcgggacagctggcatcgtgcaggcagcagcgcgcgtcagtgttggcaatctgcaccacgttgcgaccccaccggtttttcactatcttggccttggaagcctgctcctttagcgcgcgctggccgttctcgctggtcacatccatctctatcacctgttccttgttgatcatgtttgtcccgtgcagacactttaggtcgccctccgtctgggtgcagcggtgctcccacagcgcgcaaccggtgggctcccaattcttgtgggtcacccccgcgtaggcctgcaggtaggcctgcaggaagcgccccatcatggtcataaaggtcttctggctcgtaaaggtcagctgcaggccgcgatgctcttcgttcagccaggtcttgcagatggcggccagcgcctcggtctgctcgggcagcatcttaaaatttgtcttcaggtcgttatccacgtggtacttgtccatcatggcacgcgccgcctccatgcccttctcccaggcggacaccatgggcaggcttagggggtttatcacttccagcggcgaggacaccgtactttcgatttcttcttcctccccctcttcccggcgcgcgcccccgctgttgcgcgctcttaccgcctgcaccaaggggtcgtcttcaggcaagcgccgcaccgagcgcttgccgcccttgacctgcttgatcagtaccggcgggttgctgaagcccaccatggtcagcgccgcctgctcttcttcgtcttcgctgtctaccactatttctggggaggggcttctccgctctgcggcaaaggcggcggatcgcttcttttttttcttgggagccgccgcgatggagtccgccacggcgaccgaggtcgagggcgtggggctgggggtgcgcggtaccagggcctcgtcgccctcggactcttcctctgactccaggcggcggcggagtcgcttctttgggggcgcgcgcgtcagcggcggcggagacggggacggggacggggacgggacgccctccacagggggtggtcttcgcgcagacccgcggccgcgctcgggggtcttctcgcgctggtcttggtcccgactggccattgtatcctcctcctcctaggcagagagacataaggagtctatcatgcaagtcgagaaggaggagagcttaaccaccccctcagagaccgccgatgcgcccgccgtcgccgtcgcccccgctaccgccgacgcgcccgccacaccgagcgacacccccacggacccccccgccgacgcacccctgttcgaggaagcggccgtggagcaggacccgggctttgtctcggcagaggaggatttgcaagaggaggagaataaggaggagaagccctcagtgccaaaagatcataaagagcaagacgagcacgacgcagacgcacaccagggtgaagtcgggcggggggacggagggcatggcggcgccgactacctagacgaaggaaacgacgtgctcttgaagcacctgcatcgtcagtgcgccatcgtctgcgacgctctgcaggagcgcagcgaggtgcccctcagcgtggcggaggtcagccgcgcctacgagctcagcctcttttccccccgggtgcccccccgccgccgcgaaaacggcacatgcgagcccaacccgcgcctcaacttctaccccgcctttgtggtgcccgaggtcctggccacctatcacatcttctttcaaaattgcaagatccccatctcgtgccgcgccaaccgtagccgcgccgataagatgctggccctgcgccagggcgaccacatacctgatatcgccgctttggaagatgtgccaaagatcttcgagggtctggggcgcaacgagaagcgggcagcaaactctctgcaacaggaaaacagcgaaaatgagagtcacactggagcgctggtggagctggagggcgacaacgcccgcctggcggtgctcaagcgcagcatcgaggtcacccactttgcctaccccgcgctcaacctgccccccaaagtcatgaacgcggtcatggacgggctgatcatgcgccgcggccggcccctcgctccagatgcaaacttgcatgaggagaccgaggacggtcagcccgtggtcagcgacgagcagctgacgcgctggctggagagcgcggaccccgccgaactggaggagcggcgcaagatgatgatggccgcggtgctggtcaccgtagagctggagtgtctgcagcgcttcttcggtgaccccgagatgcagagaaaggtcgaggagaccctacactacaccttccgccagggctacgtgcgccaggcttgcaagatctccaacgtggagctcagcaacctggtgtcctacctgggcatcttgcatgaaaaccgccttgggcagagcgtgctacactccaccctgcgcggggaggcgcgccgcgactacgtgcgcgactgcgtttacctcttcctctgctacacctggcagacggccatgggggtctggcagcagtgcctggaggagcgcaacctcaaggagctggagaagcttctgcagcgcgcgctcaaagacctctggacgggcttcaacgagcgctcggtggccgccgcgctagccgacctcatcttccccgagcgcctgctcaaaaccctccagcaggggctgcccgacttcaccagccaaagcatgttgcaaaattttaggaactttatcctggagcgttctggcatcctacccgccacctgctgcgccctgcccagcgactttgtccccctcgtgtaccgcgagtgccccccgccgctgtggggccactgctacctgttccaactggccaactacctgtcctaccacgcggacctcatggaggactccagcggcgaggggctcatggagtgccactgccgctgcaacctctgcacgccccaccgctccctggtctgcaacacccaactgctcagcgagagtcagattatcggtaccttcgagctacagggtccgtcctcctcagacgagaagtccgcggctccggggctaaaactcactccggggctgtggacttccgcctacctgcgcaaatttgtacctgaagactaccacgcccacgaaatcaggttttacgaggaccaatcccgcccgcccaaggcggagctgaccgcctgcgtcatcacccagggcgagatcctaggccaattgcaagccatccaaaaagcccgccaagagtttttgctgaagaggggtcggggggtgtatctggacccccagtcgggtgaggagctcaacccggttcccccgctgccaccgccgcgggaccttgcttcccaggataagcatcgccatggctcccagaaagaagcagcagcggccgccgctgccgccgccccacatgctggaggaagaggaggaatactgggacagtcaggcagaggaggtttcggacgaggaggagccggagacggagatggaagagtgggaggaggacagcttagacgaggaggcttccgaagccgaagaggcaggcgcaacaccgtcaccctcggccgcagccccctcgcaggcgcccccgaagtccgctcccagcatcagcagcaacagcagcgctataacctccgctcctccaccgccgcgacccacggccgaccgcagacccaaccgtagatgggacaccaccggaaccggggccggtaagtcctccgggagaggcaagcaagcgcagcgccaaggctaccgctcgtggcgcgctcacaagaacgccatagtcgcttgcttgcaagactgcggggggaacatctccttcgcccgccgcttcctgctcttccaccacggtgtggccttcccccgtaacgtcctgcattactaccgtcatctctacagcccctactgcggcggcagtgagccagaggcggccagcggcggcggcgcccgtttcggtgcctaggaagacccagggcaagacttcagccaagaaactcgcggcgaccgcggcgaacgcggtcgcgggggccctgcgcctgacggtgaacgaacccctgtcgacccgcgaactgaggaaccgaatcttccccactctctatgccatcttccagcagagcagagggcaggatcaggaactgaaagtaaaaaacaggtctctgcgctccctcacccgcagctgtctgtatcacaagagcgaagaccagcttcggcgcacgctggaggacgctgaggcactcttcagcaaatactgcgcgctcactcttaaggactagctccgcgcccttctcgaatttaggcgggaacgcctacgtcatcgcagcgccgccgtcatgagcaaggacattcccacgccatacatgtggagctatcagccgcagatgggactcgcggcgggcgcctcccaagactactccacccgcatgaactggctcagtgccggcccacacatgatctcacaggttaatgacatccgcacccatcgaaaccaaatattggtgaagcaggcggcaattaccaccacgccccgcaataatcccaaccccagggagtggcccgcgtccctggtgtatcaggaaattcccggccccaccaccgtactacttccgcgtgattcccaggccgaagtccaaatgactaactcaggggcacagctcgcgggcggctgtcgtcacagggtgcggcctcctcgccagggtataactcacctggagatccgaggcagaggtattcagctcaacgacgagtcggtgagctcctcgctcggtctcagacctgacgggaccttccagatagccggagccggccgatcttccttcacgccccgccaggcgtacctgactctgcagagctcgtcctcggcgccgcgctcgggcggcatcgggactctccagttcgtgcaggagtttgtgccctcggtctacttcaaccccttctcgggctctcccggtcgctacccggaccagtttatcccgaactttgacgccgcgagggactcggtggacggctacgactgaatgtcgggtggacccggtgcagagcaacttcgcctgaagcaccttgaccactgccgccgccctcagtgctttgcccgctgtcagaccggtgagttccagtacttttccctgcccgactcgcacccggacggcccggcgcacggggtgcgctttttcatcccgagtcaggtccgctctaccctaatcagggagttcaccgcccgtcccctactggcggagttggaaaaggggccttctatcctaaccattgcctgcatttgctctaaccctggattacaccaagatctttgctgtcatttgtgtgctgagtataataaaggctgagatcagaatctactcggaccttatccctttcaattgatcataactgtaatcaataaaaaatcacttacttgaaatctgatagcaagactctgtccaattttttcagcaacacttccttcccctcctcccaactctggtactctaggcgcctcctagctgcaaacttcctccacagtctgaagggaatgtcagattcctcctcctgtccctccgcacccacgatcttcatgttgttacagatgaaacgcgcgagatcgtctgacgagaccttcaaccccgtgtacccctacgataccgagatcgctccgacttctgtccctttccttacccctccctttgtatcatccgcaggaatgcaagaaaatccagctggggtgctgtccctgcacctgtcagagccccttaccacccacaatggggccctgactctaaaaatggggggcggcctgaccctggacaaggaagggaatctcacttcccaaaacatcaccagtgtcgatccccctctcaaaaaaagcaagaacaacatcagccttcagaccgccgcacccctcgccgtcagctccggggccctaaccctttttgccactccccccctagcggtcagtggcgacaaccttactgtgcagtctcaggcccctcttactttggaagactcaaaactaactctggccaccaaaggacccctaactgtgtccgaaggcaaacttgtcctagaaacagagcctcccctgcatgcaagtgacagcagtagcctgggccttagcgtcacggccccacttagcattaacaatgacagcctaggactagacatgcaagcgcccatcagctctcgagatggaaaactggctctaacagtggcggcccccctaactgtggccgagggtatcaatgctttggcagtagccacaggtaatggtattggactaaatgaaaccaacacacacctgcaggcaaaactggtcgcgcccctaggctttgataccaacggcaacattaagctaagcgtcgcaggaggcatgaggctaaacaataacacactgatactagatgtaaactacccatttgaggctcaaggccaactgagcctaagagtgggctcgggcccactatatgtagattctagtagtcataacctaaccattagatgccttaggggattgtatgtaacatcttctaacaaccaaaacggtctagaggccaacattaaactaacaaaaggccttgtgtatgacggaaatgccatagcagttaatgttggcaaagggctggaatacagccctactggcacaacagaaaaacctatacagactaaaataggtctaggcatggagtatgacactgagggagccatgatgacaaaactaggctctggactaagctttgacaattcaggagccattgtggtgggaaacaaaaatgatgacaggcttactttgtggaccacaccggacccatcgcccaactgtcagatttactctgaaaaagatgctaaactaaccttggtactgactaaatgtggcagtcaggttg

SEQ ID NO: 714 - protein, 16 aa, Homo sapiens
GSTGCLTCRHHQTSHE

SEQ ID NO: 715 - protein, 15 aa, Homo sapiens
VVGRRHETAPQPLLV

SEQ ID NO: 716 - protein, 15 aa, Homo sapiens
APQPLLVPDRAGGEG

SEQ ID NO: 717 - protein, 9 aa, Homo sapiens
DRAGGEGGA

SEQ ID NO: 718 - protein, 15 aa, Homo sapiens
PVPTATPGVRSVTSP

SEQ ID NO: 719 - protein, 15 aa, Homo sapiens
VRSVTSPQGLGLFLK

SEQ ID NO: 720 - protein, 9 aa, Homo sapiens
GLGLFLKFI

SEQ ID NO: 721 - protein, 15 aa, Homo sapiens
KENDVREVCDVYLQM

SEQ ID NO: 722 - protein, 15 aa, Homo sapiens
CDVYLQMQIFFHFKF

SEQ ID NO: 723 - protein, 12 aa, Homo sapiens
IFFHFKFRSYFH

SEQ ID NO: 724 - protein, 15 aa, Homo sapiens
FARKMLEKVHRQHLQ

SEQ ID NO: 725 - protein, 14 aa, Homo sapiens
VHRQHLQLSHNSQE

SEQ ID NO: 726 - protein, 15 aa, Homo sapiens
MFLRKEQQVGPHSFS

SEQ ID NO: 727 - protein, 9 aa, Homo sapiens
VGPHSFSML

SEQ ID NO: 728 - protein, 15 aa, Homo sapiens
GLNLNTDRPGGYSYS

SEQ ID NO: 729 - protein, 15 aa, Homo sapiens
PGGYSYSIWWKNNAK

SEQ ID NO: 730 - protein, 9 aa, Homo sapiens
WWKNNAKNR

SEQ ID NO: 731 - protein, 15 aa, Homo sapiens
KVLNEIDAVVTVPPS

SEQ ID NO: 732 - protein, 15 aa, Homo sapiens
VVTVPPSLSTSQIPQ

SEQ ID NO: 733 - protein, 13 aa, Homo sapiens
STSQIPQGCCIIL

SEQ ID NO: 734 - protein, 15 aa, Homo sapiens
ANLKGTLQVRSGQAV

SEQ ID NO: 735 - protein, 10 aa, Homo sapiens
VRSGQAVSPR

SEQ ID NO: 736 - protein, 15 aa, Homo sapiens
LQAAASGQGKQGVPC

SEQ ID NO: 737 - protein, 15 aa, Homo sapiens
GKQGVPCPWGCCAYA

SEQ ID NO: 738 - protein, 15 aa, Homo sapiens
WGCCAYAESPRALIS

SEQ ID NO: 739 - protein, 15 aa, Homo sapiens
SPRALISGDAPSQVE

SEQ ID NO: 740 - protein, 15 aa, Homo sapiens
DAPSQVEREVPGPCL

SEQ ID NO: 741 - protein, 15 aa, Homo sapiens
EVPGPCLNTHSLSHR

SEQ ID NO: 742 - protein, 15 aa, Homo sapiens
THSLSHRSPQLPGLP

SEQ ID NO: 743 - protein, 14 aa, Homo sapiens
PQLPGLPHPKQPSV

SEQ ID NO: 744 - protein, 15 aa, Homo sapiens
GEVELSEGGEGQRHL

SEQ ID NO: 745 - protein, 15 aa, Homo sapiens
GEGQRHLAFPWACSG

SEQ ID NO: 746 - protein, 15 aa, Homo sapiens
FPWACSGPGWRGVCC

SEQ ID NO: 747 - protein, 15 aa, Homo sapiens
KMRAIQAEGGHGQAC

SEQ ID NO: 748 - protein, 15 aa, Homo sapiens
GGHGQACCGGAWGWA

SEQ ID NO: 749 - protein, 15 aa, Homo sapiens
GGAWGWAPGDGGPQG

SEQ ID NO: 750 - protein, 15 aa, Homo sapiens
GDGGPQGMLTHTLPT

SEQ ID NO: 751 - protein, 15 aa, Homo sapiens
LTHTLPTLGFQSAWT

SEQ ID NO: 752 - protein, 15 aa, Homo sapiens
GFQSAWTWRREDADR

SEQ ID NO: 753 - protein, 15 aa, Homo sapiens
RREDADRAWRTPKAC

SEQ ID NO: 754 - protein, 14 aa, Homo sapiens
WRTPKACASRRWSI

SEQ ID NO: 755 - protein, 15 aa, Homo sapiens
LLEPFRRGEPGPRGL

SEQ ID NO: 756 - protein, 15 aa, Homo sapiens
EPGPRGLLSGSSRGG

SEQ ID NO: 757 - protein, 15 aa, Homo sapiens
SGSSRGGEGPGRSIE

SEQ ID NO: 758 - protein, 15 aa, Homo sapiens
GPGRSIEAAPATPLP

SEQ ID NO: 759 - protein, 15 aa, Homo sapiens
APATPLPCCRKNPCR

SEQ ID NO: 760 - protein, 15 aa, Homo sapiens
CRKNPCRPQPSRFLP

SEQ ID NO: 761 - protein, 15 aa, Homo sapiens
QPSRFLPPRVLLVII

SEQ ID NO: 762 - protein, 15 aa, Homo sapiens
RVLLVIILPKLDCPK

SEQ ID NO: 763 - protein, 10 aa, Homo sapiens
PKLDCPKLGF

SEQ ID NO: 764 - protein, 15 aa, Homo sapiens
PSGRRTKRLVTLRSG

SEQ ID NO: 765 - protein, 15 aa, Homo sapiens
LVTLRSGCAIQCWHP

SEQ ID NO: 766 - protein, 15 aa, Homo sapiens
AIQCWHPRAGPVPSA

SEQ ID NO: 767 - protein, 15 aa, Homo sapiens
AGPVPSALPHTERPP

SEQ ID NO: 768 - protein, 15 aa, Homo sapiens
PHTERPPRLVRGAAD

SEQ ID NO: 769 - protein, 15 aa, Homo sapiens
LVRGAADPRTVTLGR

SEQ ID NO: 770 - protein, 15 aa, Homo sapiens
RTVTLGRSPAVMPRA

SEQ ID NO: 771 - protein, 9 aa, Homo sapiens
PAVMPRAPA

SEQ ID NO: 772 - protein, 15 aa, Homo sapiens
DCMLSEEGGQARRGG

SEQ ID NO: 773 - protein, 15 aa, Homo sapiens
GQARRGGSLCSLAAH

SEQ ID NO: 774 - protein, 15 aa, Homo sapiens
LCSLAAHTIASAARG

SEQ ID NO: 775 - protein, 15 aa, Homo sapiens
IASAARGRFLSRLSN

SEQ ID NO: 776 - protein, 15 aa, Homo sapiens
FLSRLSNFCAVVKAS

SEQ ID NO: 777 - protein, 16 aa, Homo sapiens
CAVVKASRGAPSCTWE

SEQ ID NO: 778 - protein, 15 aa, Homo sapiens
PEPRRLSPGEPRGRP

SEQ ID NO: 779 - protein, 15 aa, Homo sapiens
GEPRGRPRKGWGIWG

SEQ ID NO: 780 - protein, 15 aa, Homo sapiens
KGWGIWGLCGARVGP

SEQ ID NO: 781 - protein, 11 aa, Homo sapiens
CGARVGPKAWR

SEQ ID NO: 782 - protein, 15 aa, Homo sapiens
FVSLTAIQMASSATP

SEQ ID NO: 783 - protein, 15 aa, Homo sapiens
MASSATPWGRWPVAT

SEQ ID NO: 784 - protein, 15 aa, Homo sapiens
GRWPVATPTAACPRR

SEQ ID NO: 785 - protein, 15 aa, Homo sapiens
TAACPRRRPSSLPTG

SEQ ID NO: 786 - protein, 15 aa, Homo sapiens
PSSLPTGGDSASKKP

SEQ ID NO: 787 - protein, 15 aa, Homo sapiens
DSASKKPISRRAPWQ

SEQ ID NO: 788 - protein, 15 aa, Homo sapiens
SRRAPWQPWACPGRS

SEQ ID NO: 789 - protein, 15 aa, Homo sapiens
WACPGRSVNSAAPRA

SEQ ID NO: 790 - protein, 15 aa, Homo sapiens
NSAAPRAWCPPATTP

SEQ ID NO: 791 - protein, 15 aa, Homo sapiens
CPPATTPRTQSPSRD

SEQ ID NO: 792 - protein, 15 aa, Homo sapiens
TQSPSRDLRPRCLSS

SEQ ID NO: 793 - protein, 10 aa, Homo sapiens
RPRCLSSWSS

SEQ ID NO: 794 - protein, 15 aa, Homo sapiens
PVAIKPGTGPPNNSS

SEQ ID NO: 795 - protein, 15 aa, Homo sapiens
GPPNNSSIHGGSKRS

SEQ ID NO: 796 - protein, 15 aa, Homo sapiens
HGGSKRSENSYCRDL

SEQ ID NO: 797 - protein, 15 aa, Homo sapiens
NSYCRDLRGQLRAIC

SEQ ID NO: 798 - protein, 15 aa, Homo sapiens
GQLRAICCSSYSHDR

SEQ ID NO: 799 - protein, 15 aa, Homo sapiens
SSYSHDRHTTEERGS

SEQ ID NO: 800 - protein, 15 aa, Homo sapiens
TTEERGSRGRHVWRI

SEQ ID NO: 801 - protein, 15 aa, Homo sapiens
GRHVWRIRRLHTSGL

SEQ ID NO: 802 - protein, 15 aa, Homo sapiens
RLHTSGLPCCCHSGP

SEQ ID NO: 803 - protein, 15 aa, Homo sapiens
CCCHSGPHPRRLPDI

SEQ ID NO: 804 - protein, 15 aa, Homo sapiens
PRRLPDILRLVTSTK

SEQ ID NO: 805 - protein, 15 aa, Homo sapiens
RLVTSTKTDHTNTTE

SEQ ID NO: 806 - protein, 13 aa, Homo sapiens
DHTNTTEGTLDYL

SEQ ID NO: 807 - protein, 15 aa, Homo sapiens
KWNKNWTATLGALTI

SEQ ID NO: 808 - protein, 15 aa, Homo sapiens
TLGALTIRGHKLLCH

SEQ ID NO: 809 - protein, 15 aa, Homo sapiens
GHKLLCHLPHLLSSV

SEQ ID NO: 810 - protein, 16 aa, Homo sapiens
PHLLSSVQQTCRSSSR

SEQ ID NO: 811 - protein, 15 aa, Homo sapiens
ENASLVFTGSNSPIP

SEQ ID NO: 812 - protein, 15 aa, Homo sapiens
GSNSPIPACELSSHP

SEQ ID NO: 813 - protein, 15 aa, Homo sapiens
CELSSHPAHGISPWI

SEQ ID NO: 814 - protein, 15 aa, Homo sapiens
HGISPWIPSPGNEHF

SEQ ID NO: 815 - protein, 15 aa, Homo sapiens
SPGNEHFHGIKKQVK

SEQ ID NO: 816 - protein, 12 aa, Homo sapiens
GIKKQVKAIKVE

SEQ ID NO: 817 - protein, 15 aa, Homo sapiens
RLTQRLVQGWTPMEN

SEQ ID NO: 818 - protein, 15 aa, Homo sapiens
GWTPMENRWCGRRAG

SEQ ID NO: 819 - protein, 15 aa, Homo sapiens
WCGRRAGGQPASSST

SEQ ID NO: 820 - protein, 15 aa, Homo sapiens
QPASSSTRWTTCRAA

SEQ ID NO: 821 - protein, 15 aa, Homo sapiens
WTTCRAACLLTKWTA

SEQ ID NO: 822 - protein, 15 aa, Homo sapiens
LLTKWTAGRSQTSIG

SEQ ID NO: 823 - protein, 15 aa, Homo sapiens
ENSGNASRWLHVPSS

SEQ ID NO: 824 - protein, 15 aa, Homo sapiens
WLHVPSSSDDWLGWK

SEQ ID NO: 825 - protein, 16 aa, Homo sapiens
DDWLGWKKSSAITSNS

SEQ ID NO: 826 - protein, 15 aa, Homo sapiens
KGSVERRSVSLGHPA

SEQ ID NO: 827 - protein, 15 aa, Homo sapiens
VSLGHPAEGWAWAER

SEQ ID NO: 828 - protein, 15 aa, Homo sapiens
GWAWAERSLQPGMTT

SEQ ID NO: 829 - protein, 15 aa, Homo sapiens
LQPGMTTANTGCLSF

SEQ ID NO: 830 - protein, 15 aa, Homo sapiens
NTGCLSFHHRGCLLP

SEQ ID NO: 831 - protein, 15 aa, Homo sapiens
HRGCLLPVLPKLHCG

SEQ ID NO: 832 - protein, 15 aa, Homo sapiens
LPKLHCGLGGLPLVR

SEQ ID NO: 833 - protein, 15 aa, Homo sapiens
GGLPLVRAKEIKRVQ

SEQ ID NO: 834 - protein, 15 aa, Homo sapiens
KEIKRVQRAGESSLP

SEQ ID NO: 835 - protein, 15 aa, Homo sapiens
AGESSLPVKGLLTVA

SEQ ID NO: 836 - protein, 15 aa, Homo sapiens
KGLLTVASAVIAVLW

SEQ ID NO: 837 - protein, 15 aa, Homo sapiens
AVIAVLWGRPSEVTG

SEQ ID NO: 838 - protein, 14 aa, Homo sapiens
RPSEVTGENEAQHD

SEQ ID NO: 839 - protein, 15 aa, Homo sapiens
FGLTTLAGRSSHGTS

SEQ ID NO: 840 - protein, 15 aa, Homo sapiens
RSSHGTSGLRAATHT

SEQ ID NO: 841 - protein, 15 aa, Homo sapiens
LRAATHTKSGDGGQG

SEQ ID NO: 842 - protein, 15 aa, Homo sapiens
SGDGGQGAARQCEKL

SEQ ID NO: 843 - protein, 15 aa, Homo sapiens
ARQCEKLLELARATR

SEQ ID NO: 844 - protein, 15 aa, Homo sapiens
ELARATRPWGRSTSA

SEQ ID NO: 845 - protein, 15 aa, Homo sapiens
WGRSTSASSRWTHRG

SEQ ID NO: 846 - protein, 15 aa, Homo sapiens
SRWTHRGYMCPPRCA

SEQ ID NO: 847 - protein, 11 aa, Homo sapiens
MCPPRCAVACW

SEQ ID NO: 848 - protein, 15 aa, Homo sapiens
IIDSDKIMAVCMGCL

SEQ ID NO: 849 - protein, 15 aa, Homo sapiens
DKIMAVCMGCLLTRH

SEQ ID NO: 850 - protein, 15 aa, Homo sapiens
AVCMGCLLTRHVQCQ

SEQ ID NO: 851 - protein, 15 aa, Homo sapiens
GCLLTRHVQCQAMEM

SEQ ID NO: 852 - protein, 13 aa, Homo sapiens
TRHVQCQAMEMQQ

SEQ ID NO: 853 - protein, 16 aa, Homo sapiens
LSIFLFLMLCKLEFHA

SEQ ID NO: 854 - protein, 15 aa, Homo sapiens
LLNAEDYRCAIHSKE

SEQ ID NO: 855 - protein, 15 aa, Homo sapiens
CAIHSKEIYLLSPSP

SEQ ID NO: 856 - protein, 15 aa, Homo sapiens
YLLSPSPHQAMDKFS

SEQ ID NO: 857 - protein, 15 aa, Homo sapiens
QAMDKFSLCCINCNL

SEQ ID NO: 858 - protein, 15 aa, Homo sapiens
CCINCNLCLHVFLLL

SEQ ID NO: 859 - protein, 15 aa, Homo sapiens
LHVFLLLLFFQNKDV

SEQ ID NO: 860 - protein, 15 aa, Homo sapiens
FFQNKDVWLISNIIL

SEQ ID NO: 861 - protein, 14 aa, Homo sapiens
LISNIILLWIYGGI

SEQ ID NO: 862 - protein, 15 aa, Homo sapiens
VETLENANSFSSGIQ

SEQ ID NO: 863 - protein, 15 aa, Homo sapiens
SFSSGIQPLLCSLIG

SEQ ID NO: 864 - protein, 12 aa, Homo sapiens
LLCSLIGLENPT

SEQ ID NO: 865 - protein, 15 aa, Homo sapiens
AGAGTISEGSVLHGQ

SEQ ID NO: 866 - protein, 15 aa, Homo sapiens
GSVLHGQRLECDARR

SEQ ID NO: 867 - protein, 15 aa, Homo sapiens
LECDARRFFGCGTTI

SEQ ID NO: 868 - protein, 14 aa, Homo sapiens
FGCGTTILAEWEHH

SEQ ID NO: 869 - protein, 15 aa, Homo sapiens
KEQILAVASLVSSQS

SEQ ID NO: 870 - protein, 15 aa, Homo sapiens
SLVSSQSIHPSWGQS

SEQ ID NO: 871 - protein, 12 aa, Homo sapiens
HPSWGQSPLSRI

SEQ ID NO: 872 - protein, 15 aa, Homo sapiens
QQLRIFCAAMASNED

SEQ ID NO: 873 - protein, 9 aa, Homo sapiens
AMASNEDFS

SEQ ID NO: 874 - protein, 15 aa, Homo sapiens
DGFSGSLFAVVTRRC

SEQ ID NO: 875 - protein, 15 aa, Homo sapiens
AVVTRRCYFLKWRTI

SEQ ID NO: 876 - protein, 15 aa, Homo sapiens
FLKWRTIFPQSLMWL

SEQ ID NO: 877 - protein, 15 aa, Homo sapiens
DLRRVATYCAPLPSS

SEQ ID NO: 878 - protein, 15 aa, Homo sapiens
CAPLPSSWRPGTGTT

SEQ ID NO: 879 - protein, 15 aa, Homo sapiens
RPGTGTTIPPRMRSC

SEQ ID NO: 880 - protein, 15 aa, Homo sapiens
LQERMELLACGAERG

SEQ ID NO: 881 - protein, 15 aa, Homo sapiens
ACGAERGAGGWGGGG

SEQ ID NO: 882 - protein, 15 aa, Homo sapiens
GGWGGGGGGGGGDRR

SEQ ID NO: 883 - protein, 15 aa, Homo sapiens
GGGGDRRGGGGSAPA

SEQ ID NO: 884 - protein, 16 aa, Homo sapiens
GGGSAPALADFAGGRG

SEQ ID NO: 885 - protein, 15 aa, Homo sapiens
WTDIVKQSVSTNCIS

SEQ ID NO: 886 - protein, 15 aa, Homo sapiens
VSTNCISIKKGSYTK

SEQ ID NO: 887 - protein, 15 aa, Homo sapiens
KKGSYTKLFSLVFLI

SEQ ID NO: 888 - protein, 16 aa, Homo sapiens
FSLVFLIFCWPLIIQL

SEQ ID NO: 889 - protein, 15 aa, Homo sapiens
LRYGALCNVSRISYF

SEQ ID NO: 890 - protein, 15 aa, Homo sapiens
VSRISYFSLTNIFNF

SEQ ID NO: 891 - protein, 15 aa, Homo sapiens
LTNIFNFVIKSLTAI

SEQ ID NO: 892 - protein, 15 aa, Homo sapiens
RKERNIRKSESTLRL

SEQ ID NO: 893 - protein, 15 aa, Homo sapiens
SESTLRLSPFPTPAP

SEQ ID NO: 894 - protein, 15 aa, Homo sapiens
PFPTPAPSGAPAAAQ

SEQ ID NO: 895 - protein, 15 aa, Homo sapiens
GAPAAAQGKVVRVPG

SEQ ID NO: 896 - protein, 15 aa, Homo sapiens
KVVRVPGPAGGLVPR

SEQ ID NO: 897 - protein, 15 aa, Homo sapiens
AGGLVPRDAGARLLP

SEQ ID NO: 898 - protein, 15 aa, Homo sapiens
AGARLLPPAGGPGGG

SEQ ID NO: 899 - protein, 15 aa, Homo sapiens
AGGPGGGAAAGEGRA

SEQ ID NO: 900 - protein, 15 aa, Homo sapiens
AAGEGRAGRGRFPSI

SEQ ID NO: 901 - protein, 15 aa, Homo sapiens
RGRFPSITEPRPRDL

SEQ ID NO: 902 - protein, 15 aa, Homo sapiens
EPRPRDLPPRVATGR

SEQ ID NO: 903 - protein, 15 aa, Homo sapiens
PRVATGRRAGGRRKG

SEQ ID NO: 904 - protein, 15 aa, Homo sapiens
AGGRRKGAGQGVRTR

SEQ ID NO: 905 - protein, 15 aa, Homo sapiens
GQGVRTRPLPASWPG

SEQ ID NO: 906 - protein, 15 aa, Homo sapiens
LPASWPGGRGPFRKG

SEQ ID NO: 907 - protein, 15 aa, Homo sapiens
RGPFRKGPRRLPLGS

SEQ ID NO: 908 - protein, 15 aa, Homo sapiens
RRLPLGSGPPAAGVQ

SEQ ID NO: 909 - protein, 15 aa, Homo sapiens
PPAAGVQRLRCSHLS

SEQ ID NO: 910 - protein, 15 aa, Homo sapiens
LRCSHLSRGPRRRRG

SEQ ID NO: 911 - protein, 15 aa, Homo sapiens
GPRRRRGRVCGRACV

SEQ ID NO: 912 - protein, 15 aa, Homo sapiens
VCGRACVSPPLPPRP

SEQ ID NO: 913 - protein, 15 aa, Homo sapiens
PPLPPRPPPVGLSAE

SEQ ID NO: 914 - protein, 15 aa, Homo sapiens
PVGLSAENLSWLSSG

SEQ ID NO: 915 - protein, 15 aa, Homo sapiens
LSWLSSGLPRACSWR

SEQ ID NO: 916 - protein, 15 aa, Homo sapiens
PRACSWREFSPETCA

SEQ ID NO: 917 - protein, 15 aa, Homo sapiens
FSPETCAFRLSGLDS

SEQ ID NO: 918 - protein, 15 aa, Homo sapiens
RLSGLDSKLSARVER

SEQ ID NO: 919 - protein, 15 aa, Homo sapiens
LSARVERDLGALRAP

SEQ ID NO: 920 - protein, 15 aa, Homo sapiens
LGALRAPGSRAAQGG

SEQ ID NO: 921 - protein, 15 aa, Homo sapiens
SRAAQGGGRVRGSRS

SEQ ID NO: 922 - protein, 15 aa, Homo sapiens
RVRGSRSEWKTRPWR

SEQ ID NO: 923 - protein, 15 aa, Homo sapiens
WKTRPWRPPPAWPLT

SEQ ID NO: 924 - protein, 15 aa, Homo sapiens
PPAWPLTRAGGPLPK

SEQ ID NO: 925 - protein, 15 aa, Homo sapiens
AGGPLPKNPFLESCS

SEQ ID NO: 926 - protein, 15 aa, Homo sapiens
PFLESCSETAQRRRV

SEQ ID NO: 927 - protein, 15 aa, Homo sapiens
TAQRRRVFSFSTPLS

SEQ ID NO: 928 - protein, 15 aa, Homo sapiens
SINKATITGKKDLEL

SEQ ID NO: 929 - protein, 15 aa, Homo sapiens
GKKDLELILHVSRKK

SEQ ID NO: 930 - protein, 15 aa, Homo sapiens
LHVSRKKPFLPRVNI

SEQ ID NO: 931 - protein, 15 aa, Homo sapiens
FLPRVNITPTPISCC

SEQ ID NO: 932 - protein, 15 aa, Homo sapiens
PTPISCCNLKMLKKF

SEQ ID NO: 933 - protein, 15 aa, Homo sapiens
LKMLKKFFLLYIIIS

SEQ ID NO: 934 - protein, 15 aa, Homo sapiens
LLYIIISIIDLTNCL

SEQ ID NO: 935 - protein, 15 aa, Homo sapiens
IDLTNCLSCYLEHFY

SEQ ID NO: 936 - protein, 15 aa, Homo sapiens
CYLEHFYRFTFFTDV

SEQ ID NO: 937 - protein, 10 aa, Homo sapiens
FTFFTDVHYF

SEQ ID NO: 938 - protein, 15 aa, Homo sapiens
PYYSALSGNSWVPST

SEQ ID NO: 939 - protein, 15 aa, Homo sapiens
NSWVPSTLESDPFGY

SEQ ID NO: 940 - protein, 15 aa, Homo sapiens
ESDPFGYVFSPLATR

SEQ ID NO: 941 - protein, 15 aa, Homo sapiens
FSPLATRPALNDQES

SEQ ID NO: 942 - protein, 15 aa, Homo sapiens
ALNDQESILWPTLTS

SEQ ID NO: 943 - protein, 15 aa, Homo sapiens
LWPTLTSVVSCALSC

SEQ ID NO: 944 - protein, 15 aa, Homo sapiens
VSCALSCPSLNLPEN

SEQ ID NO: 945 - protein, 15 aa, Homo sapiens
SLNLPENWLTLITGG

SEQ ID NO: 946 - protein, 15 aa, Homo sapiens
LTLITGGMKGGKKMK

SEQ ID NO: 947 - protein, 12 aa, Homo sapiens
KGGKKMKFTFRH

SEQ ID NO: 948 - protein, 15 aa, Homo sapiens
GLRNLGNTVRAILLS

SEQ ID NO: 949 - protein, 15 aa, Homo sapiens
VRAILLSFLSKRNVK

SEQ ID NO: 950 - protein, 15 aa, Homo sapiens
LSKRNVKWCWGWGKP

SEQ ID NO: 951 - protein, 15 aa, Homo sapiens
CWGWGKPTSLGKACG

SEQ ID NO: 952 - protein, 14 aa, Homo sapiens
SLGKACGRRALKLF

SEQ ID NO: 953 - protein, 15 aa, Homo sapiens
MEAENAGSLHFHEVL

SEQ ID NO: 954 - protein, 14 aa, Homo sapiens
LHFHEVLKMGHVKF

SEQ ID NO: 955 - protein, 15 aa, Homo sapiens
WTPIPVLTRWPLPHP

SEQ ID NO: 956 - protein, 15 aa, Homo sapiens
RWPLPHPPPWRRATS

SEQ ID NO: 957 - protein, 15 aa, Homo sapiens
PWRRATSCRMARSSP

SEQ ID NO: 958 - protein, 15 aa, Homo sapiens
RMARSSPSATSGSSV

SEQ ID NO: 959 - protein, 15 aa, Homo sapiens
ATSGSSVRRRCSSLP

SEQ ID NO: 960 - protein, 15 aa, Homo sapiens
RRCSSLPSWVWNLAA

SEQ ID NO: 961 - protein, 16 aa, Homo sapiens
WVWNLAASTRPRSTPS

SEQ ID NO: 962 - protein, 15 aa, Homo sapiens
LHPQRETFTPRWSGA

SEQ ID NO: 963 - protein, 15 aa, Homo sapiens
TPRWSGANYWKLAFP

SEQ ID NO: 964 - protein, 15 aa, Homo sapiens
YWKLAFPVGAEGTFP

SEQ ID NO: 965 - protein, 15 aa, Homo sapiens
GAEGTFPAAATQRGV

SEQ ID NO: 966 - protein, 11 aa, Homo sapiens
AATQRGVVRPA

SEQ ID NO: 967 - protein, 15 aa, Homo sapiens
MAGGVLRRLLCREPD

SEQ ID NO: 968 - protein, 15 aa, Homo sapiens
LLCREPDRDGDKGAS

SEQ ID NO: 969 - protein, 15 aa, Homo sapiens
DGDKGASREETVVPL

SEQ ID NO: 970 - protein, 15 aa, Homo sapiens
EETVVPLHIGDPVVL

SEQ ID NO: 971 - protein, 15 aa, Homo sapiens
IGDPVVLPGIGQCYS

SEQ ID NO: 972 - protein, 10 aa, Homo sapiens
GIGQCYSALF

SEQ ID NO: 973 - protein, 15 aa, Homo sapiens
VFFKRAAEGFFRMNK

SEQ ID NO: 974 - protein, 15 aa, Homo sapiens
GFFRMNKLKESSDTN

SEQ ID NO: 975 - protein, 15 aa, Homo sapiens
KESSDTNPKPYCMAA

SEQ ID NO: 976 - protein, 15 aa, Homo sapiens
KPYCMAAPMGLTENN

SEQ ID NO: 977 - protein, 15 aa, Homo sapiens
MGLTENNRNRKKSYR

SEQ ID NO: 978 - protein, 15 aa, Homo sapiens
NRKKSYRETNLKAVS

SEQ ID NO: 979 - protein, 13 aa, Homo sapiens
TNLKAVSWPLNHT

SEQ ID NO: 980 - protein, 13 aa, Homo sapiens
GWRGVCCAAVEPA

SEQ ID NO: 981 - DNA, 10712 bp, Artificial Sequence
  self-replicating RNA plasmid
taatacgactcactatagataggcggcgcatgagagaagcccagaccaattacctacccaaataggagaaagttcacgttgacatcgaggaagacagcccattcctcagagctttgcagcggagcttcccgcagtttgaggtagaagccaagcaggtcactgataatgaccatgctaatgccagagcgttttcgcatctggcttcaaaactgatcgaaacggaggtggacccatccgacacgatccttgacattggaatagtcagcatagtacatttcatctgactaatactacaacaccaccaccatgaatagaggattctttaacatgctcggccgccgccccttcccggcccccactgccatgtggaggccgcggagaaggaggcaggcggccccgggaagcggagctactaacttcagcctgctgaagcaggctggagacgtggaggagaaccctggacctgagaaagttcacgttgacatcgaggaagacagcccattcctcagagctttgcagcggagcttcccgcagtttgaggtagaagccaagcaggtcactgataatgaccatgctaatgccagagcgttttcgcatctggcttcaaaactgatcgaaacggaggtggacccatccgacacgatccttgacattggaagtgcgcccgcccgcagaatgtattctaagcacaagtatcattgtatctgtccgatgagatgtgcggaagatccggacagattgtataagtatgcaactaagctgaagaaaaactgtaaggaaataactgataaggaattggacaagaaaatgaaggagctcgccgccgtcatgagcgaccctgacctggaaactgagactatgtgcctccacgacgacgagtcgtgtcgctacgaagggcaagtcgctgtttaccaggatgtatacgcggttgacggaccgacaagtctctatcaccaagccaataagggagttagagtcgcctactggataggctttgacaccaccccttttatgtttaagaacttggctggagcatatccatcatactctaccaactgggccgacgaaaccgtgttaacggctcgtaacataggcctatgcagctctgacgttatggagcggtcacgtagagggatgtccattcttagaaagaagtatttgaaaccatccaacaatgttctattctctgttggctcgaccatctaccacgagaagagggacttactgaggagctggcacctgccgtctgtatttcacttacgtggcaagcaaaattacacatgtcggtgtgagactatagttagttgcgacgggtacgtcgttaaaagaatagctatcagtccaggcctgtatgggaagccttcaggctatgctgctacgatgcaccgcgagggattcttgtgctgcaaagtgacagacacattgaacggggagagggtctcttttcccgtgtgcacgtatgtgccagctacattgtgtgaccaaatgactggcatactggcaacagatgtcagtgcggacgacgcgcaaaaactgctggttgggctcaaccagcgtatagtcgtcaacggtcgcacccagagaaacaccaataccatgaaaaattaccttttgcccgtagtggcccaggcatttgctaggtgggcaaaggaatataaggaagatcaagaagatgaaaggccactaggactacgagatagacagttagtcatggggtgttgttgggcttttagaaggcacaagataacatctatttataagcgcccggatacccaaaccatcatcaaagtgaacagcgatttccactcattcgtgctgcccaggataggcagtaacacattggagatcgggctgagaacaagaatcaggaaaatgttagaggagcacaaggagccgtcacctctcattaccgccgaggacgtacaagaagctaagtgcgcagccgatgaggctaaggaggtgcgtgaagccgaggagttgcgcgcagctctaccacctttggcagctgatgttgaggagcccactctggaagccgatgtcgacttgatgttacaagaggctggggccggctcagtggagacacctcgtggcttgataaaggttaccagctacgatggcgaggacaagatcggctcttacgctgtgctttctccgcaggctgtactcaagagtgaaaaattatcttgcatccaccctctcgctgaacaagtcatagtgataacacactctggccgaaaagggcgttatgccgtggaaccataccatggtaaagtagtggtgccagagggacatgcaatacccgtccaggactttcaagctctgagtgaaagtgccaccattgtgtacaacgaacgtgagttcgtaaacaggtacctgcaccatattgccacacatggaggagcgctgaacactgatgaagaatattacaaaactgtcaagcccagcgagcacgacggcgaatacctgtacgacatcgacaggaaacagtgcgtcaagaaagaactagtcactgggctagggctcacaggcgagctggtggatcctcccttccatgaattcgcctacgagagtctgagaacacgaccagccgctccttaccaagtaccaaccataggggtgtatggcgtgccaggatcaggcaagtctggcatcattaaaagcgcagtcaccaaaaaagatctagtggtgagcgccaagaaagaaaactgtgcagaaattataagggacgtcaagaaaatgaaagggctggacgtcaatgccagaactgtggactcagtgctcttgaatggatgcaaacaccccgtagagaccctgtatattgacgaagcttttgcttgtcatgcaggtactctcagagcgctcatagccattataagacctaaaaaggcagtgctctgcggggatcccaaacagtgcggtttttttaacatgatgtgcctgaaagtgcattttaaccacgagatttgcacacaagtcttccacaaaagcatctctcgccgttgcactaaatctgtgacttcggtcgtctcaaccttgttttacgacaaaaaaatgagaacgacgaatccgaaagagactaagattgtgattgacactaccggcagtaccaaacctaagcaggacgatctcattctcacttgtttcagagggtgggtgaagcagttgcaaatagattacaaaggcaacgaaataatgacggcagctgcctctcaagggctgacccgtaaaggtgtgtatgccgttcggtacaaggtgaatgaaaatcctctgtacgcacccacctctgaacatgtgaacgtcctactgacccgcacggaggaccgcatcgtgtggaaaacactagccggcgacccatggataaaaacactgactgccaagtaccctgggaatttcactgccacgatagaggagtggcaagcagagcatgatgccatcatgaggcacatcttggagagaccggaccctaccgacgtcttccagaataaggcaaacgtgtgttgggccaaggctttagtgccggtgctgaagaccgctggcatagacatgaccactgaacaatggaacactgtggattattttgaaacggacaaagctcactcagcagagatagtattgaaccaactatgcgtgaggttctttggactcgatctggactccggtctattttctgcacccactgttccgttatccattaggaataatcactgggataactccccgtcgcctaacatgtacgggctgaataaagaagtggtccgtcagctctctcgcaggtacccacaactgcctcgggcagttgccactggaagagtctatgacatgaacactggtacactgcgcaattatgatccgcgcataaacctagtacctgtaaacagaagactgcctcatgctttagtcctccaccataatgaacacccacagagtgacttttcttcattcgtcagcaaattgaagggcagaactgtcctggtggtcggggaaaagttgtccgtcccaggcaaaatggttgactggttgtcagaccggcctgaggctaccttcagagctcggctggatttaggcatcccaggtgatgtgcccaaatatgacataatatttgttaatgtgaggaccccatataaataccatcactatcagcagtgtgaagaccatgccattaagcttagcatgttgaccaagaaagcttgtctgcatctgaatcccggcggaacctgtgtcagcataggttatggttacgctgacagggccagcgaaagcatcattggtgctatagcgcggcagttcaagttttcccgggtatgcaaaccgaaatcctcacttgaagagacggaagttctgtttgtattcattgggtacgatcgcaaggcccgtacgcacaatccttacaagctttcatcaaccttgaccaacatttatacaggttccagactccacgaagccggatgtgcaccctcatatcatgtggtgcgaggggatattgccacggccaccgaaggagtgattataaatgctgctaacagcaaaggacaacctggcggaggggtgtgcggagcgctgtataagaaattcccggaaagcttcgatttacagccgatcgaagtaggaaaagcgcgactggtcaaaggtgcagctaaacatatcattcatgccgtaggaccaaacttcaacaaagtttcggaggttgaaggtgacaaacagttggcagaggcttatgagtccatcgctaagattgtcaacgataacaattacaagtcagtagcgattccactgttgtccaccggcatcttttccgggaacaaagatcgactaacccaatcattgaaccatttgctgacagctttagacaccactgatgcagatgtagccatatactgcagggacaagaaatgggaaatgactctcaaggaagcagtggctaggagagaagcagtggaggagatatgcatatccgacgactcttcagtgacagaacctgatgcagagctggtgagggtgcatccgaagagttctttggctggaaggaagggctacagcacaagcgatggcaaaactttctcatatttggaagggaccaagtttcaccaggcggccaaggatatagcagaaattaatgccatgtggcccgttgcaacggaggccaatgagcaggtatgcatgtatatcctcggagaaagcatgagcagtattaggtcgaaatgccccgtcgaagagtcggaagcctccacaccacctagcacgctgccttgcttgtgcatccatgccatgactccagaaagagtacagcgcctaaaagcctcacgtccagaacaaattactgtgtgctcatcctttccattgccgaagtatagaatcactggtgtgcagaagatccaatgctcccagcctatattgttctcaccgaaagtgcctgcgtatattcatccaaggaagtatctcgtggaaacaccaccggtagacgagactccggagccatcggcagagaaccaatccacagaggggacacctgaacaaccaccacttataaccgaggatgagaccaggactagaacgcctgagccgatcatcatcgaagaggaagaagaggatagcataagtttgctgtcagatggcccgacccaccaggtgctgcaagtcgaggcagacattcacgggccgccctctgtatctagctcatcctggtccattcctcatgcatccgactttgatgtggacagtttatccatacttgacaccctggagggagctagcgtgaccagcggggcaacgtcagccgagactaactcttacttcgcaaagagtatggagtttctggcgcgaccggtgcctgcgcctcgaacagtattcaggaaccctccacatcccgctccgcgcacaagaacaccgtcacttgcacccagcagggcctgctcgagaaccagcctagtttccaccccgccaggcgtgaatagggtgatcactagagaggagctcgaggcgcttaccccgtcacgcactcctagcaggtcggtctcgagaaccagcctggtctccaacccgccaggcgtaaatagggtgattacaagagaggagtttgaggcgttcgtagcacaacaacaatgacggtttgatgcgggtgcatacatcttttcctccgacaccggtcaagggcatttacaacaaaaatcagtaaggcaaacggtgctatccgaagtggtgttggagaggaccgaattggagatttcgtatgccccgcgcctcgaccaagaaaaagaagaattactacgcaagaaattacagttaaatcccacacctgctaacagaagcagataccagtccaggaaggtggagaacatgaaagccataacagctagacgtattctgcaaggcctagggcattatttgaaggcagaaggaaaagtggagtgctaccgaaccctgcatcctgttcctttgtattcatctagtgtgaaccgtgccttttcaagccccaaggtcgcagtggaagcctgtaacgccatgttgaaagagaactttccgactgtggcttcttactgtattattccagagtacgatgcctatttggacatggttgacggagcttcatgctgcttagacactgccagtttttgccctgcaaagctgcgcagctttccaaagaaacactcctatttggaacccacaatacgatcggcagtgccttcagcgatccagaacacgctccagaacgtcctggcagctgccacaaaaagaaattgcaatgtcacgcaaatgagagaattgcccgtattggattcggcggcctttaatgtggaatgcttcaagaaatatgcgtgtaataatgaatattgggaaacgtttaaagaaaaccccatcaggcttactgaagaaaacgtggtaaattacattaccaaattaaaaggaccaaaagctgctgctctttttgcgaagacacataatttgaatatgttgcaggacataccaatggacaggtttgtaatggacttaaagagagacgtgaaagtgactccaggaacaaaacatactgaagaacggcccaaggtacaggtgatccaggctgccgatccgctagcaacagcgtatctgtgcggaatccaccgagagctggttaggagattaaatgcggtcctgcttccgaacattcatacactgtttgatatgtcggctgaagactttgacgctattatagccgagcacttccagcctggggattgtgttctggaaactgacatcgcgtcgtttgataaaagtgaggacgacgccatggctctgaccgcgttaatgattctggaagacttaggtgtggacgcagagctgttgacgctgattgaggcggctttcggcgaaatttcatcaatacatttgcccactaaaactaaatttaaattcggagccatgatgaaatctggaatgttcctcacactgtttgtgaacacagtcattaacattgtaatcgcaagcagagtgttgagagaacggctaaccggatcaccatgtgcagcattcattggagatgacaatatcgtgaaaggagtcaaatcggacaaattaatggcagacaggtgcgccacctggttgaatatggaagtcaagattatagatgctgtggtgggcgagaaagcgccttatttctgtggagggtttattttgtgtgactccgtgaccggcacagcgtgccgtgtggcagaccccctaaaaaggctgtttaagcttggcaaacctctggcagcagacgatgaacatgatgatgacaggagaagggcattgcatgaagagtcaacacgctggaaccgagtgggtattctttcagagctgtgcaaggcagtagaatcaaggtatgaaaccgtaggaacttccatcatagttatggccatgactactctagctagcagtgttaaatcattcagctacctgagaggggcccctataactctctacggctaacctgaatggactacgacatagtctagtccgccaagatatcggcgcgccgtttaaacggccggccttaattaagtaacgatacagcagcaattggcaagctgcttacatagaactcgcggcgattggcatgccgctttaaaatttttattttatttttcttttcttttccgaatcggattttgtttttaatatttcaaaaaaaaaaaaaaaaaaaaaaaaaaaaaaaaaaaaaaacccctctctaaacggaggggtttttttcagcgtaactggactggccacagttaggcggccgcgcatgttcatcatcagtaacccgtatcgtgagcatcctctctcgtttcatcggtatcattacctccatgaacagaaatcccccttacacggaggcatcagtgaccaaacaggaaaaaaccgcccttaacatggcccgctttatcagaagccagacattaacgcttctggagaaactcaacgagctggacgcggatgaacaggcagacatctgtgaatcgcttcacgaccacgctgatgagctttaccgcagctgcctcgcgcgtttcggtgatgacggtgaaaacctctgacacatgcagctcccggagacggtcacagcttgtctgtaagcggatgccgggagcagacaagcccgtcagggcgcgtcagcgggtgttggcgggtgtcggggcgcagccatgacccagtcacgtagcgatagcggagtgtatactggcttaactatgcggcatcagagcagattgtactgagagtgcaccatatgcggtgtgaaataccgcacagatgcgtaaggagaaaataccgcatcaggcgctcgcttcctcgctcactgactcgctgcgctcggtcgttcggctgcggcgagcggtatcagctcactcaaaggcggtaatacggttatccacagaatcaggggataacgcaggaaagaacatgtgagcaaaaggccagcaaaaggccaggaaccgtaaaaaggccgcgttgctggcgtttttccataggctccgcccccctgacgagcatcacaaaaatcgacgctcaagtcagaggtggcgaaacccgacaggactataaagataccaggcgtttccccctggaagctccctcgtgcgctctcctgttccgaccctgccgcttaccggatacctgtccgcctttctcccttcgggaagcgtggcgctttctcatagctcacgctgtaggtatctcagttcggtgtaggtcgttcgctccaagctgggctgtgtgcacgaaccccccgttcagcccgaccgctgcgccttatccggtaactatcgtcttgagtccaacccggtaagacacgacttatcgccactggcagcagccactggtaacaggattagcagagcgaggtatgtaggcggtgctacagagttcttgaagtggtggcctaactacggctacactagaaggacagtatttggtatctgcgctctgctgaagccagttaccttcggaaaaagagttggtagctcttgatccggcaaacaaaccaccgctggtagcggtggtttttttgtttgcaagcagcagattacgcgcagaaaaaaaggatctcaagaagatcctttgatcttttctacggggtctgacgctcagtggaacgaaaactcacgttaagggattttggtcatgagattatcaaaaaggatcttcacctagatccttttaaattaaaaatgaagttttaaatcaatctaaagtatatatgagtaaacttggtctgacagttattagaaaaattcatccagcagacgataaaacgcaatacgctggctatccggtgccgcaatgccatacagcaccagaaaacgatccgcccattcgccgcccagttcttccgcaatatcacgggtggccagcgcaatatcctgataacgatccgccacgcccagacggccgcaatcaataaagccgctaaaacggccattttccaccataatgttcggcaggcacgcatcaccatgggtcaccaccagatcttcgccatccggcatgctcgctttcagacgcgcaaacagctctgccggtgccaggccctgatgttcttcatccagatcatcctgatccaccaggcccgcttccatacgggtacgcgcacgttcaatacgatgtttcgcctgatgatcaaacggacaggtcgccgggtccagggtatgcagacgacgcatggcatccgccataatgctcactttttctgccggcgccagatggctagacagcagatcctgacccggcacttcgcccagcagcagccaatcacggcccgcttcggtcaccacatccagcaccgccgcacacggaacaccggtggtggccagccagctcagacgcgccgcttcatcctgcagctcgttcagcgcaccgctcagatcggttttcacaaacagcaccggacgaccctgcgcgctcagacgaaacaccgccgcatcagagcagccaatggtctgctgcgcccaatcatagccaaacagacgttccacccacgctgccgggctacccgcatgcaggccatcctgttcaatcatactcttcctttttcaatattattgaagcatttatcagggttattgtctcatgagcggatacatatttgaatgtatttagaaaaataaacaaataggggttccgcgcacatttccccgaaaagtgccacctgacgtctaagaaaccattattatcatgacattaagcatccgcctttcgttttatttgaccatgttggtatg

SEQ ID NO: 982 - DNA, 29 bp, Artificial Sequence
  T7 terminator
aacccctctctaaacggaggggttttttt

SEQ ID NO: 983 - DNA, 105 bp, Artificial Sequence
  AmpR promoter
cgcggaacccctatttgtttatttttctaaatacattcaaatatgtatccgctcatgagacaataaccctgataaatgcttcaataatattgaaaaaggaagagt

SEQ ID NO: 984 - DNA, 24 bp, Artificial Sequence
  26S promoter
ctctctacggctaacctgaatgga

SEQ ID NO: 985 - DNA, 18 bp, Artificial Sequence
  T7 promoter
taatacgactcactatag

SEQ ID NO: 986 - DNA, 39 bp, Artificial Sequence
  Poly A site
aaaaaaaaaaaaaaaaaaaaaaaaaaaaaaaaaaaaaaa

SEQ ID NO: 987 - DNA, 195 bp, Artificial Sequence
  Alpha 5' replication nsP1 sequence
taggagaaagttcacgttgacatcgaggaagacagcccattcctcagagctttgcagcggagcttcccgcagtttgaggtagaagccaagcaggtcactgataatgaccatgctaatgccagagcgttttcgcatctggcttcaaaactgatcgaaacggaggtggacccatccgacacgatccttgacattgga

SEQ ID NO: 988 - DNA, 142 bp, Artificial Sequence
  DLP
atagtcagcatagtacatttcatctgactaatactacaacaccaccaccatgaatagaggattctttaacatgctcggccgccgccccttcccggcccccactgccatgtggaggccgcggagaaggaggcaggcggccccg

SEQ ID NO: 989 - DNA, 66 bp, Artificial Sequence
  P2A
ggaagcggagctactaacttcagcctgctgaagcaggctggagacgtggaggagaaccctggacct

SEQ ID NO: 990 - DNA, 141 bp, Artificial Sequence
  Bon
cgcagccatgacccagtcacgtagcgatagcggagtgtatactggcttaactatgcggcatcagagcagattgtactgagagtgcaccatatgcggtgtgaaataccgcacagatgcgtaaggagaaaataccgcatcagg

SEQ ID NO: 991 - DNA, 5796 bp, Artificial Sequence
  DLP nsp ORF
atgaatagaggattctttaacatgctcggccgccgccccttcccggcccccactgccatgtggaggccgcggagaaggaggcaggcggccccgggaagcggagctactaacttcagcctgctgaagcaggctggagacgtggaggagaaccctggacctgagaaagttcacgttgacatcgaggaagacagcccattcctcagagctttgcagcggagcttcccgcagtttgaggtagaagccaagcaggtcactgataatgaccatgctaatgccagagcgttttcgcatctggcttcaaaactgatcgaaacggaggtggacccatccgacacgatccttgacattggaagtgcgcccgcccgcagaatgtattctaagcacaagtatcattgtatctgtccgatgagatgtgcggaagatccggacagattgtataagtatgcaactaagctgaagaaaaactgtaaggaaataactgataaggaattggacaagaaaatgaaggagctcgccgccgtcatgagcgaccctgacctggaaactgagactatgtgcctccacgacgacgagtcgtgtcgctacgaagggcaagtcgctgtttaccaggatgtatacgcggttgacggaccgacaagtctctatcaccaagccaataagggagttagagtcgcctactggataggctttgacaccaccccttttatgtttaagaacttggctggagcatatccatcatactctaccaactgggccgacgaaaccgtgttaacggctcgtaacataggcctatgcagctctgacgttatggagcggtcacgtagagggatgtccattcttagaaagaagtatttgaaaccatccaacaatgttctattctctgttggctcgaccatctaccacgagaagagggacttactgaggagctggcacctgccgtctgtatttcacttacgtggcaagcaaaattacacatgtcggtgtgagactatagttagttgcgacgggtacgtcgttaaaagaatagctatcagtccaggcctgtatgggaagccttcaggctatgctgctacgatgcaccgcgagggattcttgtgctgcaaagtgacagacacattgaacggggagagggtctcttttcccgtgtgcacgtatgtgccagctacattgtgtgaccaaatgactggcatactggcaacagatgtcagtgcggacgacgcgcaaaaactgctggttgggctcaaccagcgtatagtcgtcaacggtcgcacccagagaaacaccaataccatgaaaaattaccttttgcccgtagtggcccaggcatttgctaggtgggcaaaggaatataaggaagatcaagaagatgaaaggccactaggactacgagatagacagttagtcatggggtgttgttgggcttttagaaggcacaagataacatctatttataagcgcccggatacccaaaccatcatcaaagtgaacagcgatttccactcattcgtgctgcccaggataggcagtaacacattggagatcgggctgagaacaagaatcaggaaaatgttagaggagcacaaggagccgtcacctctcattaccgccgaggacgtacaagaagctaagtgcgcagccgatgaggctaaggaggtgcgtgaagccgaggagttgcgcgcagctctaccacctttggcagctgatgttgaggagcccactctggaagccgatgtcgacttgatgttacaagaggctggggccggctcagtggagacacctcgtggcttgataaaggttaccagctacgatggcgaggacaagatcggctcttacgctgtgctttctccgcaggctgtactcaagagtgaaaaattatcttgcatccaccctctcgctgaacaagtcatagtgataacacactctggccgaaaagggcgttatgccgtggaaccataccatggtaaagtagtggtgccagagggacatgcaatacccgtccaggactttcaagctctgagtgaaagtgccaccattgtgtacaacgaacgtgagttcgtaaacaggtacctgcaccatattgccacacatggaggagcgctgaacactgatgaagaatattacaaaactgtcaagcccagcgagcacgacggcgaatacctgtacgacatcgacaggaaacagtgcgtcaagaaagaactagtcactgggctagggctcacaggcgagctggtggatcctcccttccatgaattcgcctacgagagtctgagaacacgaccagccgctccttaccaagtaccaaccataggggtgtatggcgtgccaggatcaggcaagtctggcatcattaaaagcgcagtcaccaaaaaagatctagtggtgagcgccaagaaagaaaactgtgcagaaattataagggacgtcaagaaaatgaaagggctggacgtcaatgccagaactgtggactcagtgctcttgaatggatgcaaacaccccgtagagaccctgtatattgacgaagcttttgcttgtcatgcaggtactctcagagcgctcatagccattataagacctaaaaaggcagtgctctgcggggatcccaaacagtgcggtttttttaacatgatgtgcctgaaagtgcattttaaccacgagatttgcacacaagtcttccacaaaagcatctctcgccgttgcactaaatctgtgacttcggtcgtctcaaccttgttttacgacaaaaaaatgagaacgacgaatccgaaagagactaagattgtgattgacactaccggcagtaccaaacctaagcaggacgatctcattctcacttgtttcagagggtgggtgaagcagttgcaaatagattacaaaggcaacgaaataatgacggcagctgcctctcaagggctgacccgtaaaggtgtgtatgccgttcggtacaaggtgaatgaaaatcctctgtacgcacccacctctgaacatgtgaacgtcctactgacccgcacggaggaccgcatcgtgtggaaaacactagccggcgacccatggataaaaacactgactgccaagtaccctgggaatttcactgccacgatagaggagtggcaagcagagcatgatgccatcatgaggcacatcttggagagaccggaccctaccgacgtcttccagaataaggcaaacgtgtgttgggccaaggctttagtgccggtgctgaagaccgctggcatagacatgaccactgaacaatggaacactgtggattattttgaaacggacaaagctcactcagcagagatagtattgaaccaactatgcgtgaggttctttggactcgatctggactccggtctattttctgcacccactgttccgttatccattaggaataatcactgggataactccccgtcgcctaacatgtacgggctgaataaagaagtggtccgtcagctctctcgcaggtacccacaactgcctcgggcagttgccactggaagagtctatgacatgaacactggtacactgcgcaattatgatccgcgcataaacctagtacctgtaaacagaagactgcctcatgctttagtcctccaccataatgaacacccacagagtgacttttcttcattcgtcagcaaattgaagggcagaactgtcctggtggtcggggaaaagttgtccgtcccaggcaaaatggttgactggttgtcagaccggcctgaggctaccttcagagctcggctggatttaggcatcccaggtgatgtgcccaaatatgacataatatttgttaatgtgaggaccccatataaataccatcactatcagcagtgtgaagaccatgccattaagcttagcatgttgaccaagaaagcttgtctgcatctgaatcccggcggaacctgtgtcagcataggttatggttacgctgacagggccagcgaaagcatcattggtgctatagcgcggcagttcaagttttcccgggtatgcaaaccgaaatcctcacttgaagagacggaagttctgtttgtattcattgggtacgatcgcaaggcccgtacgcacaatccttacaagctttcatcaaccttgaccaacatttatacaggttccagactccacgaagccggatgtgcaccctcatatcatgtggtgcgaggggatattgccacggccaccgaaggagtgattataaatgctgctaacagcaaaggacaacctggcggaggggtgtgcggagcgctgtataagaaattcccggaaagcttcgatttacagccgatcgaagtaggaaaagcgcgactggtcaaaggtgcagctaaacatatcattcatgccgtaggaccaaacttcaacaaagtttcggaggttgaaggtgacaaacagttggcagaggcttatgagtccatcgctaagattgtcaacgataacaattacaagtcagtagcgattccactgttgtccaccggcatcttttccgggaacaaagatcgactaacccaatcattgaaccatttgctgacagctttagacaccactgatgcagatgtagccatatactgcagggacaagaaatgggaaatgactctcaaggaagcagtggctaggagagaagcagtggaggagatatgcatatccgacgactcttcagtgacagaacctgatgcagagctggtgagggtgcatccgaagagttctttggctggaaggaagggctacagcacaagcgatggcaaaactttctcatatttggaagggaccaagtttcaccaggcggccaaggatatagcagaaattaatgccatgtggcccgttgcaacggaggccaatgagcaggtatgcatgtatatcctcggagaaagcatgagcagtattaggtcgaaatgccccgtcgaagagtcggaagcctccacaccacctagcacgctgccttgcttgtgcatccatgccatgactccagaaagagtacagcgcctaaaagcctcacgtccagaacaaattactgtgtgctcatcctttccattgccgaagtatagaatcactggtgtgcagaagatccaatgctcccagcctatattgttctcaccgaaagtgcctgcgtatattcatccaaggaagtatctcgtggaaacaccaccggtagacgagactccggagccatcggcagagaaccaatccacagaggggacacctgaacaaccaccacttataaccgaggatgagaccaggactagaacgcctgagccgatcatcatcgaagaggaagaagaggatagcataagtttgctgtcagatggcccgacccaccaggtgctgcaagtcgaggcagacattcacgggccgccctctgtatctagctcatcctggtccattcctcatgcatccgactttgatgtggacagtttatccatacttgacaccctggagggagctagcgtgaccagcggggcaacgtcagccgagactaactcttacttcgcaaagagtatggagtttctggcgcgaccggtgcctgcgcctcgaacagtattcaggaaccctccacatcccgctccgcgcacaagaacaccgtcacttgcacccagcagggcctgctcgagaaccagcctagtttccaccccgccaggcgtgaatagggtgatcactagagaggagctcgaggcgcttaccccgtcacgcactcctagcaggtcggtctcgagaaccagcctggtctccaacccgccaggcgtaaatagggtgattacaagagaggagtttgaggcgttcgtagcacaacaacaatga

SEQ ID NO: 992 - DNA, 2382 bp, Artificial Sequence
  nsP2
ggctcagtggagacacctcgtggcttgataaaggttaccagctacgatggcgaggacaagatcggctcttacgctgtgctttctccgcaggctgtactcaagagtgaaaaattatcttgcatccaccctctcgctgaacaagtcatagtgataacacactctggccgaaaagggcgttatgccgtggaaccataccatggtaaagtagtggtgccagagggacatgcaatacccgtccaggactttcaagctctgagtgaaagtgccaccattgtgtacaacgaacgtgagttcgtaaacaggtacctgcaccatattgccacacatggaggagcgctgaacactgatgaagaatattacaaaactgtcaagcccagcgagcacgacggcgaatacctgtacgacatcgacaggaaacagtgcgtcaagaaagaactagtcactgggctagggctcacaggcgagctggtggatcctcccttccatgaattcgcctacgagagtctgagaacacgaccagccgctccttaccaagtaccaaccataggggtgtatggcgtgccaggatcaggcaagtctggcatcattaaaagcgcagtcaccaaaaaagatctagtggtgagcgccaagaaagaaaactgtgcagaaattataagggacgtcaagaaaatgaaagggctggacgtcaatgccagaactgtggactcagtgctcttgaatggatgcaaacaccccgtagagaccctgtatattgacgaagcttttgcttgtcatgcaggtactctcagagcgctcatagccattataagacctaaaaaggcagtgctctgcggggatcccaaacagtgcggtttttttaacatgatgtgcctgaaagtgcattttaaccacgagatttgcacacaagtcttccacaaaagcatctctcgccgttgcactaaatctgtgacttcggtcgtctcaaccttgttttacgacaaaaaaatgagaacgacgaatccgaaagagactaagattgtgattgacactaccggcagtaccaaacctaagcaggacgatctcattctcacttgtttcagagggtgggtgaagcagttgcaaatagattacaaaggcaacgaaataatgacggcagctgcctctcaagggctgacccgtaaaggtgtgtatgccgttcggtacaaggtgaatgaaaatcctctgtacgcacccacctctgaacatgtgaacgtcctactgacccgcacggaggaccgcatcgtgtggaaaacactagccggcgacccatggataaaaacactgactgccaagtaccctgggaatttcactgccacgatagaggagtggcaagcagagcatgatgccatcatgaggcacatcttggagagaccggaccctaccgacgtcttccagaataaggcaaacgtgtgttgggccaaggctttagtgccggtgctgaagaccgctggcatagacatgaccactgaacaatggaacactgtggattattttgaaacggacaaagctcactcagcagagatagtattgaaccaactatgcgtgaggttctttggactcgatctggactccggtctattttctgcacccactgttccgttatccattaggaataatcactgggataactccccgtcgcctaacatgtacgggctgaataaagaagtggtccgtcagctctctcgcaggtacccacaactgcctcgggcagttgccactggaagagtctatgacatgaacactggtacactgcgcaattatgatccgcgcataaacctagtacctgtaaacagaagactgcctcatgctttagtcctccaccataatgaacacccacagagtgacttttcttcattcgtcagcaaattgaagggcagaactgtcctggtggtcggggaaaagttgtccgtcccaggcaaaatggttgactggttgtcagaccggcctgaggctaccttcagagctcggctggatttaggcatcccaggtgatgtgcccaaatatgacataatatttgttaatgtgaggaccccatataaataccatcactatcagcagtgtgaagaccatgccattaagcttagcatgttgaccaagaaagcttgtctgcatctgaatcccggcggaacctgtgtcagcataggttatggttacgctgacagggccagcgaaagcatcattggtgctatagcgcggcagttcaagttttcccgggtatgcaaaccgaaatcctcacttgaagagacggaagttctgtttgtattcattgggtacgatcgcaaggcccgtacgcacaatccttacaagctttcatcaaccttgaccaacatttatacaggttccagactccacgaagccggatgt

SEQ ID NO: 993 - DNA, 1821 bp, Artificial Sequence
  nsP4
tacatcttttcctccgacaccggtcaagggcatttacaacaaaaatcagtaaggcaaacggtgctatccgaagtggtgttggagaggaccgaattggagatttcgtatgccccgcgcctcgaccaagaaaaagaagaattactacgcaagaaattacagttaaatcccacacctgctaacagaagcagataccagtccaggaaggtggagaacatgaaagccataacagctagacgtattctgcaaggcctagggcattatttgaaggcagaaggaaaagtggagtgctaccgaaccctgcatcctgttcctttgtattcatctagtgtgaaccgtgccttttcaagccccaaggtcgcagtggaagcctgtaacgccatgttgaaagagaactttccgactgtggcttcttactgtattattccagagtacgatgcctatttggacatggttgacggagcttcatgctgcttagacactgccagtttttgccctgcaaagctgcgcagctttccaaagaaacactcctatttggaacccacaatacgatcggcagtgccttcagcgatccagaacacgctccagaacgtcctggcagctgccacaaaaagaaattgcaatgtcacgcaaatgagagaattgcccgtattggattcggcggcctttaatgtggaatgcttcaagaaatatgcgtgtaataatgaatattgggaaacgtttaaagaaaaccccatcaggcttactgaagaaaacgtggtaaattacattaccaaattaaaaggaccaaaagctgctgctctttttgcgaagacacataatttgaatatgttgcaggacataccaatggacaggtttgtaatggacttaaagagagacgtgaaagtgactccaggaacaaaacatactgaagaacggcccaaggtacaggtgatccaggctgccgatccgctagcaacagcgtatctgtgcggaatccaccgagagctggttaggagattaaatgcggtcctgcttccgaacattcatacactgtttgatatgtcggctgaagactttgacgctattatagccgagcacttccagcctggggattgtgttctggaaactgacatcgcgtcgtttgataaaagtgaggacgacgccatggctctgaccgcgttaatgattctggaagacttaggtgtggacgcagagctgttgacgctgattgaggcggctttcggcgaaatttcatcaatacatttgcccactaaaactaaatttaaattcggagccatgatgaaatctggaatgttcctcacactgtttgtgaacacagtcattaacattgtaatcgcaagcagagtgttgagagaacggctaaccggatcaccatgtgcagcattcattggagatgacaatatcgtgaaaggagtcaaatcggacaaattaatggcagacaggtgcgccacctggttgaatatggaagtcaagattatagatgctgtggtgggcgagaaagcgccttatttctgtggagggtttattttgtgtgactccgtgaccggcacagcgtgccgtgtggcagaccccctaaaaaggctgtttaagcttggcaaacctctggcagcagacgatgaacatgatgatgacaggagaagggcattgcatgaagagtcaacacgctggaaccgagtgggtattctttcagagctgtgcaaggcagtagaatcaaggtatgaaaccgtaggaacttccatcatagttatggccatgactactctagctagcagtgttaaatcattcagctacctgagaggggcccctataactctctacggc

SEQ ID NO: 994 - DNA, 1671 bp, Artificial Sequence
  nsP3
gcaccctcatatcatgtggtgcgaggggatattgccacggccaccgaaggagtgattataaatgctgctaacagcaaaggacaacctggcggaggggtgtgcggagcgctgtataagaaattcccggaaagcttcgatttacagccgatcgaagtaggaaaagcgcgactggtcaaaggtgcagctaaacatatcattcatgccgtaggaccaaacttcaacaaagtttcggaggttgaaggtgacaaacagttggcagaggcttatgagtccatcgctaagattgtcaacgataacaattacaagtcagtagcgattccactgttgtccaccggcatcttttccgggaacaaagatcgactaacccaatcattgaaccatttgctgacagctttagacaccactgatgcagatgtagccatatactgcagggacaagaaatgggaaatgactctcaaggaagcagtggctaggagagaagcagtggaggagatatgcatatccgacgactcttcagtgacagaacctgatgcagagctggtgagggtgcatccgaagagttctttggctggaaggaagggctacagcacaagcgatggcaaaactttctcatatttggaagggaccaagtttcaccaggcggccaaggatatagcagaaattaatgccatgtggcccgttgcaacggaggccaatgagcaggtatgcatgtatatcctcggagaaagcatgagcagtattaggtcgaaatgccccgtcgaagagtcggaagcctccacaccacctagcacgctgccttgcttgtgcatccatgccatgactccagaaagagtacagcgcctaaaagcctcacgtccagaacaaattactgtgtgctcatcctttccattgccgaagtatagaatcactggtgtgcagaagatccaatgctcccagcctatattgttctcaccgaaagtgcctgcgtatattcatccaaggaagtatctcgtggaaacaccaccggtagacgagactccggagccatcggcagagaaccaatccacagaggggacacctgaacaaccaccacttataaccgaggatgagaccaggactagaacgcctgagccgatcatcatcgaagaggaagaagaggatagcataagtttgctgtcagatggcccgacccaccaggtgctgcaagtcgaggcagacattcacgggccgccctctgtatctagctcatcctggtccattcctcatgcatccgactttgatgtggacagtttatccatacttgacaccctggagggagctagcgtgaccagcggggcaacgtcagccgagactaactcttacttcgcaaagagtatggagtttctggcgcgaccggtgcctgcgcctcgaacagtattcaggaaccctccacatcccgctccgcgcacaagaacaccgtcacttgcacccagcagggcctgctcgagaaccagcctagtttccaccccgccaggcgtgaatagggtgatcactagagaggagctcgaggcgcttaccccgtcacgcactcctagcaggtcggtctcgagaaccagcctggtctccaacccgccaggcgtaaatagggtgattacaagagaggagtttgaggcgttcgtagcacaacaacaatgacggtttgatgcgggtgca

SEQ ID NO: 995 - DNA, 1602 bp, Artificial Sequence
  nsP1
gagaaagttcacgttgacatcgaggaagacagcccattcctcagagctttgcagcggagcttcccgcagtttgaggtagaagccaagcaggtcactgataatgaccatgctaatgccagagcgttttcgcatctggcttcaaaactgatcgaaacggaggtggacccatccgacacgatccttgacattggaagtgcgcccgcccgcagaatgtattctaagcacaagtatcattgtatctgtccgatgagatgtgcggaagatccggacagattgtataagtatgcaactaagctgaagaaaaactgtaaggaaataactgataaggaattggacaagaaaatgaaggagctcgccgccgtcatgagcgaccctgacctggaaactgagactatgtgcctccacgacgacgagtcgtgtcgctacgaagggcaagtcgctgtttaccaggatgtatacgcggttgacggaccgacaagtctctatcaccaagccaataagggagttagagtcgcctactggataggctttgacaccaccccttttatgtttaagaacttggctggagcatatccatcatactctaccaactgggccgacgaaaccgtgttaacggctcgtaacataggcctatgcagctctgacgttatggagcggtcacgtagagggatgtccattcttagaaagaagtatttgaaaccatccaacaatgttctattctctgttggctcgaccatctaccacgagaagagggacttactgaggagctggcacctgccgtctgtatttcacttacgtggcaagcaaaattacacatgtcggtgtgagactatagttagttgcgacgggtacgtcgttaaaagaatagctatcagtccaggcctgtatgggaagccttcaggctatgctgctacgatgcaccgcgagggattcttgtgctgcaaagtgacagacacattgaacggggagagggtctcttttcccgtgtgcacgtatgtgccagctacattgtgtgaccaaatgactggcatactggcaacagatgtcagtgcggacgacgcgcaaaaactgctggttgggctcaaccagcgtatagtcgtcaacggtcgcacccagagaaacaccaataccatgaaaaattaccttttgcccgtagtggcccaggcatttgctaggtgggcaaaggaatataaggaagatcaagaagatgaaaggccactaggactacgagatagacagttagtcatggggtgttgttgggcttttagaaggcacaagataacatctatttataagcgcccggatacccaaaccatcatcaaagtgaacagcgatttccactcattcgtgctgcccaggataggcagtaacacattggagatcgggctgagaacaagaatcaggaaaatgttagaggagcacaaggagccgtcacctctcattaccgccgaggacgtacaagaagctaagtgcgcagccgatgaggctaaggaggtgcgtgaagccgaggagttgcgcgcagctctaccacctttggcagctgatgttgaggagcccactctggaagccgatgtcgacttgatgttacaagaggctggggcc

SEQ ID NO: 996 - DNA, 798 bp, Artificial Sequence
  KanR
atgattgaacaggatggcctgcatgcgggtagcccggcagcgtgggtggaacgtctgtttggctatgattgggcgcagcagaccattggctgctctgatgcggcggtgtttcgtctgagcgcgcagggtcgtccggtgctgtttgtgaaaaccgatctgagcggtgcgctgaacgagctgcaggatgaagcggcgcgtctgagctggctggccaccaccggtgttccgtgtgcggcggtgctggatgtggtgaccgaagcgggccgtgattggctgctgctgggcgaagtgccgggtcaggatctgctgtctagccatctggcgccggcagaaaaagtgagcattatggcggatgccatgcgtcgtctgcataccctggacccggcgacctgtccgtttgatcatcaggcgaaacatcgtattgaacgtgcgcgtacccgtatggaagcgggcctggtggatcaggatgatctggatgaagaacatcagggcctggcaccggcagagctgtttgcgcgtctgaaagcgagcatgccggatggcgaagatctggtggtgacccatggtgatgcgtgcctgccgaacattatggtggaaaatggccgttttagcggctttattgattgcggccgtctgggcgtggcggatcgttatcaggatattgcgctggccacccgtgatattgcggaagaactgggcggcgaatgggcggatcgttttctggtgctgtatggcattgcggcaccggatagccagcgtattgcgttttatcgtctgctggatgaatttttctaataa

SEQ ID NO: 997 - DNA, 192 bp, Artificial Sequence
  Rop
gtgaccaaacaggaaaaaaccgcccttaacatggcccgctttatcagaagccagacattaacgcttctggagaaactcaacgagctggacgcggatgaacaggcagacatctgtgaatcgcttcacgaccacgctgatgagctttaccgcagctgcctcgcgcgtttcggtgatgacggtgaaaacctctga

SEQ ID NO: 998 - DNA, 44 bp, Artificial Sequence
  5' UTR
ataggcggcgcatgagagaagcccagaccaattacctacccaaa

SEQ ID NO: 999 - DNA, 117 bp, Artificial Sequence
  3' UTR
atacagcagcaattggcaagctgcttacatagaactcgcggcgattggcatgccgctttaaaatttttattttatttttcttttcttttccgaatcggattttgtttttaatatttc

SEQ ID NO: 1000 - DNA, 57 bp, Homo sapiens
ggggcctctgcctgtgatgtctccctcattgctatggacagtgctatcaccctgtgg

SEQ ID NO: 1001 - protein, 19 aa, Homo sapiens
GASACDVSLIAMDSAITLW

SEQ ID NO: 1002 - DNA, 57 bp, Homo sapiens
tccctctaccaccgggagaagcagctcattgctatggacagtgctatcaccctgtgg

SEQ ID NO: 1003 - protein, 19 aa, Homo sapiens
SLYHREKQLIAMDSAITLW

SEQ ID NO: 1004 - protein, 1486 aa, Artificial Sequence
  Description of Artificial Sequence: Synthetic polypeptide
QNLQNGGGSRSSATLPGRRRRRWLRRRRQPISVAPAGPPRRPNQKPNPPGGARCVIMRPTWPGTSAFTKRSFAVTERIIDYWAQKEKGSSSFLRPSCDYWAQKEKISIPRTHLCLVLGVLSGHSGSRLYEAGMTLGGKILFFLFLLLPLSPFSLIFTEISCCTLSSEENEYLPRPEWQLQVPFRELKNVSVLEGLRQGRLGGPCSCHCPRPSQARLTPVDVAGPFLCLGDPGLFPPVKSSITGGKSTCSAPGPQSLPSTPFSTYPQWVILITELGMECTLGQVGAPSPRREEDGWRGGHSRFKADVPAPQGPCWGGQPGSAPSSAPPEQSLLDWKFEMSYTVGGPPPHVHARPRHWKTDRDGHSYTSKVNCLLLQDGFHGCVSITGAAGRRNLSIFLFLMLCKLEFHACKIQNKNCPDFKKFDGPCGERGGGRTARALWARGDSVLTPALDPQTPVRAPSLTRAAAAVHYKLIQQPISLFSITDRLHKTFSQLPSVHLCSITFQWGHPPIFCSTNDICVTANFCISVTFLKPCFLLHEASASQCHLFLQPQVGTPPPHTASARAPSGPPHPHESCPAGRRPARAAQTCARRQHGLPGCEEAGTARVPSLHLHLHQAALGAGRGRGWGEACAQVPPSRGVLRFLDLKVRYLHSQWQHYHRSGEAAGTPLWRPTRNVPFRELKNQRTAQGAPGIHHAASPVAANLCDPARHAQHTRIPCGAGQVRAGRGPEAGGGVLQPQRPAPEKPGCPCRRGQPRLHTVKMWRAVAMMVPDRQVHYDFGLGVPGDSTRRAVRRMNTFYEAGMTLGEKFRVGNCKHLKMTRPNSKMALNSEALSVVSEGASACDVSLIAMDSAITLWFVQGKDWGVKKFIRRDFYAYKDFLWCFPFSLVFLQEIQICCHVSCLCCICCSTRICLGCLLELFLSRALRALHVLWNGFQLHCQTEYNQKLQVNQFSESKSLYHREKQLIAMDSAITLWICEERGAAGSLISCETMPAILKLQKNCLLSLRTALTHNQDFSIYRLCCKRGSLCHASQARSPAFPKPVRPLPAPITRITPQLGGQSDSSQPLLTTGRPQGWQDQALRHTQQASPASCATITIPIHSAALGDHSGDPGPAWDTCPPLPLTTLIPRAPPPYGDSTARSWPSRCGPLGGNTTLQQLGEASQAPSGSLIPLRLPLLWEVRGQPDSFAALHSSLNELGEIARELHQFAFDLLIKSHFVQGKDWGLKKFIRRDFWGMELAASRRFSWDHHSAGGPPRVPSVRSGAAQVQPKDPLPLRTLAGCLARTAHLRPGAESLPQPQLHCTLWFQSSELSPTGAPWPSRRPTWRGTTVSPRTATSSARTCCGTKWPSSQEAALGLGSGLLRFSCGTAAIRKMHFSLKEHPPPPCPPEAFQRAAGEGGPGRGGARRGARVLQSPFCRAGAGEWLGHQSLRHVVGYGHLDTSGSSSSSSWPNSKMALNSLNSIDDAQLTRIAPPRSHCCFWEVNAP

SEQ ID NO: 1005 - protein, 1486 aa, Artificial Sequence
  Description of Artificial Sequence: Synthetic polypeptide
QNLQNGGGSRSSATLPGRRRRRWLRRRRQPISVAPAGPPRRPNQKPNPPGGARCVIMRPTWPGTSAFTGMECTLGQVGAPSPRREEDGWRGGHSRFKADVPAPQGPCWGGQPGSAPSSAPPEQSLLDDYWAQKEKISIPRTHLCWKFEMSYTVGGPPPHVHARPRHWKTDRDYWAQKEKGSSSFLRPSCVPFRELKNVSVLEGLRQGRLGGPCSCHCPRPSQARLTPVDVAGPFLCLGDPGLFPPVKSSITEISCCTLSSEENEYLPRPEWQLQYEAGMTLGGKILFFLFLLLPLSPFSLIFLVLGVLSGHSGSRLKRSFAVTERIITGGKSTCSAPGPQSLPSTPFSTYPQWVILITELDGHSYTSKVNCLLLQDGFHGCVSITGAAGRRNLSIFLFLMLCKLEFHACQWQHYHRSGEAAGTPLWRPTRNVAMMVPDRQVHYDFGLKIQNKNCPDVLRFLDLKVRYLHSVPFRELKNQRTAQGAPGIHHAASPVAANLCDPARHAQHTRIPCGAGQVRAGRGPEAGGGVLQPQRPAPEKPGCPCRRGQPRLHTVKMWRACHLFLQPQVGTPPPHTASARAPSGPPHPHESCPAGRRPARAAQTCARRQHGLPGCEEAGTARVPSLHLHLHQAALGAGRGRGWGEACAQVPPSRGHYKLIQQPISLFSITDRLHKTFSQLPSVHLCSITFQWGHPPIFCSTNDICVTANFCISVTFLKPCFLLHEASASQFKKFDGPCGERGGGRTARALWARGDSVLTPALDPQTPVRAPSLTRAAAAVGVPGDSTRRAVRRMNTFGASACDVSLIAMDSAITLWCEERGAAGSLISCESLYHREKQLIAMDSAITLWIFVQGKDWGVKKFIRRDFTMPAILKLQKNCLLSLNSKMALNSEALSVVSEYEAGMTLGEKFRVGNCKHLKMTRPTEYNQKLQVNQFSESKRTALTHNQDFSIYRLCCKRGSLCHASQARSPAFPKPVRPLPAPITRITPQLGGQSDSSQPLLTTGRPQGWQDQALRHTQQASPASCATITIPIHSAALGDHSGDPGPAWDTCPPLPLTTLIPRAPPPYGDSTARSWPSRCGPLGYAYKDFLWCFPFSLVFLQEIQICCHVSCLCCICCSTRICLGCLLELFLSRALRALHVLWNGFQLHCQGNTTLQQLGEASQAPSGSLIPLRLPLLWEVRGNSKMALNSLNSIDDAQLTRIAPPRSHCCFWEVNAPFVQGKDWGLKKFIRRDFEAFQRAAGEGGPGRGGARRGARVLQSPFCRAGAGEWLGHQSLRWGMELAASRRFSWDHHSAGGPPRVPSVRSGAAQVQPKDPLPLRTLAGCLARTAHLRPGAESLPQPQLHCTIARELHQFAFDLLIKSHKMHFSLKEHPPPPCPPHVVGYGHLDTSGSSSSSSWPQPDSFAALHSSLNELGELWFQSSELSPTGAPWPSRRPTWRGTTVSPRTATSSARTCCGTKWPSSQEAALGLGSGLLRFSCGTAAIR
